United States Patent Application Publication US 2022/0211063 A1 - sequence listing, part 30

SEQ ID NO: 103 - DNA, 8605626 bp, Penicillium roqueforti (residues 1,721,127-3,442,252 of 8,605,626)
  misc_feature (89143)..(89590): n is a, c, g, or t
  misc_feature (91422)..(91652): n is a, c, g, or t
  misc_feature (329881)..(330017): n is a, c, g, or t
  misc_feature (430768)..(431099): n is a, c, g, or t
  misc_feature (461651)..(461667): n is a, c, g, or t
  misc_feature (496410)..(496589): n is a, c, g, or t
  misc_feature (532013)..(532107): n is a, c, g, or t
  misc_feature (539763)..(539898): n is a, c, g, or t
  misc_feature (569547)..(569751): n is a, c, g, or t
  misc_feature (649064)..(649200): n is a, c, g, or t
  misc_feature (691125)..(691187): n is a, c, g, or t
  misc_feature (866510)..(866674): n is a, c, g, or t
  misc_feature (1032466)..(1091865): n is a, c, g, or t
  misc_feature (1092552)..(1092763): n is a, c, g, or t
  misc_feature (1210196)..(1210408): n is a, c, g, or t
  misc_feature (1240554)..(1246826): n is a, c, g, or t
  misc_feature (1247753)..(1253685): n is a, c, g, or t
  misc_feature (1258304)..(1372303): n is a, c, g, or t
  misc_feature (1374137)..(1374545): n is a, c, g, or t
  misc_feature (1457544)..(1457830): n is a, c, g, or t
  misc_feature (1505357)..(1505529): n is a, c, g, or t
  misc_feature (1513228)..(1513390): n is a, c, g, or t
  misc_feature (1624050)..(1624251): n is a, c, g, or t
  misc_feature (1669160)..(1669365): n is a, c, g, or t
  misc_feature (1761228)..(1761454): n is a, c, g, or t
  misc_feature (1817775)..(1926074): n is a, c, g, or t
  misc_feature (1933175)..(1933425): n is a, c, g, or t
  misc_feature (1963987)..(1964364): n is a, c, g, or t
  misc_feature (2150522)..(2150620): n is a, c, g, or t
  misc_feature (2196752)..(2196960): n is a, c, g, or t
  misc_feature (2250746)..(2250802): n is a, c, g, or t
  misc_feature (2391558)..(2391849): n is a, c, g, or t
  misc_feature (2493588)..(2493819): n is a, c, g, or t
  misc_feature (2532194)..(2532471): n is a, c, g, or t
  misc_feature (2536340)..(2536581): n is a, c, g, or t
  misc_feature (2786627)..(2786883): n is a, c, g, or t
  misc_feature (2859585)..(2859876): n is a, c, g, or t
  misc_feature (2873996)..(2875100): n is a, c, g, or t
  misc_feature (2881617)..(2881922): n is a, c, g, or t
  misc_feature (2897171)..(2897349): n is a, c, g, or t
  misc_feature (3050746)..(3051470): n is a, c, g, or t
  misc_feature (3057261)..(3057512): n is a, c, g, or t
  misc_feature (3069611)..(3069986): n is a, c, g, or t
  misc_feature (3075842)..(3076216): n is a, c, g, or t
  misc_feature (3304906)..(3305003): n is a, c, g, or t
  misc_feature (3318192)..(3318516): n is a, c, g, or t
  misc_feature (3502503)..(3502617): n is a, c, g, or t
  misc_feature (3537788)..(3538371): n is a, c, g, or t
  misc_feature (3783217)..(3783431): n is a, c, g, or t
  misc_feature (3992070)..(3992188): n is a, c, g, or t
  misc_feature (4004970)..(4005233): n is a, c, g, or t
  misc_feature (4027160)..(4027360): n is a, c, g, or t
  misc_feature (4058285)..(4058431): n is a, c, g, or t
  misc_feature (4267035)..(4267072): n is a, c, g, or t
  misc_feature (4352538)..(4353000): n is a, c, g, or t
  misc_feature (4361537)..(4361689): n is a, c, g, or t
  misc_feature (4393455)..(4393688): n is a, c, g, or t
  misc_feature (4451187)..(4451324): n is a, c, g, or t
  misc_feature (4461216)..(4461462): n is a, c, g, or t
  misc_feature (4480922)..(4481040): n is a, c, g, or t
  misc_feature (4533587)..(4533724): n is a, c, g, or t
  misc_feature (4589847)..(4590075): n is a, c, g, or t
  misc_feature (4668669)..(4669001): n is a, c, g, or t
  misc_feature (4736843)..(4736937): n is a, c, g, or t
  misc_feature (4766465)..(4766662): n is a, c, g, or t
  misc_feature (4834245)..(4834552): n is a, c, g, or t
  misc_feature (4927235)..(4927808): n is a, c, g, or t
  misc_feature (4944816)..(4944966): n is a, c, g, or t
  misc_feature (5082236)..(5082384): n is a, c, g, or t
  misc_feature (5112277)..(5112998): n is a, c, g, or t
  misc_feature (5314355)..(5314548): n is a, c, g, or t
  misc_feature (5372288)..(5372715): n is a, c, g, or t
  misc_feature (5458669)..(5458780): n is a, c, g, or t
  misc_feature (5479980)..(5480153): n is a, c, g, or t
  misc_feature (5535122)..(5535136): n is a, c, g, or t
  misc_feature (5567270)..(5567409): n is a, c, g, or t
  misc_feature (5598490)..(5598703): n is a, c, g, or t
  misc_feature (5726526)..(5726604): n is a, c, g, or t
  misc_feature (5743037)..(5743505): n is a, c, g, or t
  misc_feature (5807199)..(5807285): n is a, c, g, or t
  misc_feature (5919535)..(5920213): n is a, c, g, or t
  misc_feature (5921527)..(5921833): n is a, c, g, or t
  misc_feature (5942409)..(5942688): n is a, c, g, or t
  misc_feature (6010874)..(6011169): n is a, c, g, or t
  misc_feature (6324695)..(6325013): n is a, c, g, or t
  misc_feature (6397105)..(6397216): n is a, c, g, or t
  misc_feature (6604362)..(6604532): n is a, c, g, or t
  misc_feature (6843301)..(6849052): n is a, c, g, or t
  misc_feature (6859407)..(6860047): n is a, c, g, or t
  misc_feature (6914764)..(6915551): n is a, c, g, or t
  misc_feature (6918855)..(6923725): n is a, c, g, or t
  misc_feature (6950174)..(6950310): n is a, c, g, or t
  misc_feature (7009778)..(7010015): n is a, c, g, or t
  misc_feature (7088368)..(7088591): n is a, c, g, or t
  misc_feature (7280661)..(7280840): n is a, c, g, or t
  misc_feature (7435020)..(7435145): n is a, c, g, or t
  misc_feature (7579716)..(7580036): n is a, c, g, or t
  misc_feature (7597713)..(7597862): n is a, c, g, or t
  misc_feature (7638927)..(7639043): n is a, c, g, or t
  misc_feature (7648137)..(7648344): n is a, c, g, or t
  misc_feature (8007031)..(8007217): n is a, c, g, or t
  misc_feature (8052759)..(8053224): n is a, c, g, or t
  misc_feature (8128886)..(8129301): n is a, c, g, or t
  misc_feature (8133596)..(8133784): n is a, c, g, or t
  misc_feature (8187871)..(8188020): n is a, c, g, or t
  misc_feature (8239554)..(8240025): n is a, c, g, or t
  misc_feature (8245462)..(8245573): n is a, c, g, or t
  misc_feature (8304738)..(8305328): n is a, c, g, or t
  misc_feature (8313694)..(8317811): n is a, c, g, or t
  misc_feature (8345163)..(8345264): n is a, c, g, or t
  misc_feature (8407543)..(8407749): n is a, c, g, or t
  misc_feature (8424434)..(8424559): n is a, c, g, or t
  misc_feature (8481328)..(8481551): n is a, c, g, or t
  misc_feature (8596939)..(8597185): n is a, c, g, or t
aattccgttctataatgtgcaagtccgattgtttggatgttcttgaatcgatccatacattcccgaagtcgatcactgaatgcttctgattccagcaggttgcgattatccgcaatcatatctttttggaccgtacgccggctttccagctcgtcgcctttgacttgccggcagctttttgacgatatagatatcataccgaggggcccttcagcgccatcgaataccacagggatcatccatagctcttgaacgtgctcgcggagaccatttgacttagataactcttccagttcgtggagactttcgtttgtcgcaatgaaacagatttttcggtaaaaggtcttcgcaaaattctccagtgagcttttatacaatgcgcggcatgataacctcagagcgaccaattcctgataatccaaatggtcatatatctttgagatcaattccacgggcaaggctgcaatggacattttggctgcgtgcgcgacgtttcgagattgagaacaataataaccaaaaagctcggtttattatccgcagaaataagtaggaatcgtagaagaattgcttttcaatttcaagttccgaaattcacggggaaaaaaaacatggagttcagtgaccaggaatggcggacaatggtgtctgccagaatttgcgcgaggtagaaagcatttcaaaggaaaagaggaacaggagcagaggcgaggattgtgattccaaacaaggactagccctggagcactacttagtaagggatactgcacacaaagtaggcagtccgtccggtacctgggacaggtactgataccggttggtcgtcccggtatcaccacccaaccgagaaatgcgcactgcaagtttaatatacgcactgcaaacacgtgaacatttcaacatttagttagttagaggtaatcaacgtactgacataatacatgaaaaaaagggccgtcctgtttatctgtctttggtacaagcccaactcacctctcttagcacccattgaacacgaaaagctggagccacgataggccttttaactctggtacaaagtgccaatctatcacacctcctggcattcagaacgacagctttcatcgcgtattggatctcggtctacatatatcgagtcactctacatccgctcgcgaaatttcctggcccgaagcttacaggcgcgaccttctggtacaagttctactacaatctatttccccacaaactgcgctttctctggaaaatcgaagacctctataatcagtacggaccaatcgtacgaatcaatccactccacatccatatccgagacccggagtatcttgacgacatctacactagcggacgccgcaagcgcaatcgcaatgagtggtttttccattcctccgtccgatgggatggtcattattcaatatagtcgatcatgacgtccagcgggtgaggcgcgctacgaagggcgcgctacgcttagcccattcttcagcaagcggtcaattcaagctctggaggaccgcgtcgtagataagatcgatattttggtagatcgaatcgcagaagcccgtcagaccggagaaaccgtgaacttgctctttgctgcaggtactctgactatatatataatctctgcttatacatttggaaaagattggaataagttgggtgagcccgactaggccgaggaggagctcgagggctacgccaagatggcgcagataggaccttttactcgtcaattcctataggtagccaaagcggtcattatattgcttctacctaagttagtgacgaagctcagtccagctgctacgcttgtactatggaacagagccctgttcaaggacatgatctagactgcagtcgaagaagaaaagactagtcagcttgaaaaatctgtatcctagtctatattccaggatatccttcagagcaacctactgcccagtgacaaaacccctgctcgcctttcagcggaggcaggtttgcttgtcatggggggaactgaaacgaccgcgagatctttagccgtcattttattcctgcttcttgacaccccgcatgtcttagatcgagtaaggaaggaactggcacagcatatgccccggcctgactcccgcatttcacttgctgagctagaagccattccttatttcgtgagttgctgctgacatcagaatgattcccataacgtcatatgtattaaccaagtcctctagtctgctatgatcaccgaaggcgtgaggctatctcacgttgtttcgagttgtataccaagatacgcccccgaggaagagctcaaatacaaggattggacgattccacccggcgtaagataaacaaccggaaacttctttggcacacgttgctaacaaaccaatcaacacaacagacaagtgttatgcaatcgcattacctccttcatactgatcccacaatcttcccagaaccatatacattcgaaccacaacggtagattgacgacccttcattaagggcaaactacttcggcaaactacttcttgggtttcggccggggtaccagagtgtgtctcggtatcaatcttgctaacgcagagttgtatctcgcagtcgcctatatctgtgcccgtttcgatatggagctatttgagactgaaagggagcgtgatgtggatgtggtcatggattctgttattagacaacctagtctggagagcaagtggatcagggtcaagatcacaagagatagactccaggatgagcaagcttagagggtgttagatcgtccaaggctttgacgatatcaacgacaccgacaatttcttggagagtacgagagtatccaaatcttaccaacatccaacatttgcgataacatcctactggtccataaattgggagttgtcccaatcgagcacggattgatatggtccccacatagcaggcgctttggaaaacgccacgggaaaaaaagagtaacattccacgggataatctccacagttcgtactccgcaggttaaggtcagccagcctcaatcaaaaccactaggcttaaattagcccgaggaaaggccaccagtctcgtttgattggttcgctcaatggggctatagataaatcccacggcccacggagtttacgactaagattttccggtacttcggtgctcctctctaaccgaggggggtccccgaacttggaataaataacctttggaattgtataacattagaagccttcggcccttaaatactattcggtcatactttacaaggatctagttcaaatcaacactttatttctcaataccttatgaaaattaagaactggttacaacaaccgtacaatgtctgccagtccaagtgaaaataggccaccagtcagagttgccaattgctctggttatcatggtatggggagcactgagattaaaccaacaggactaacgtacaaaggtgatcctgcatacgaaatgtatcggcaagcgactctaggagatgttgacttcatcacgggcgattacctggccggtaggttgcttggtataaaggaaagagataccaaggactaactaagctcagaggtcaacatggcaaataatgcccagtccttccaacgtggcgaacaccccggatatgagcagacagcctggcagggtatccagcagaccatcaatgtgattgccgaaaaaggcatcaaagtcgtactaaatggaggagctctcaaccccaaagggctagctttgaaagtacacgaattggttagtacaattcctcaactataccaatctatatactaaatcaatcgtccaaatagatccaccaaaaaggcctcgctttacgagtagcttacctatctggggacgacctctacaccaaattcggccctaacatgccgcaatccccagaacaactccaacacctcgacgccgaaaacagttccatcaaacctagccctctcacctatgcattcaccaacaccaccaagcctatccctatggtttcagcacacgcctacctcggtgcccggggaatcgtggacggcctccgtcgtggggcagatatcattatctgtggccgggttgcagacgccagtcctgttattgcggcggcgtggtactggcactcctggtcggagtcggactatgaccgtctggctgggtccctggtggcgggtcaccttattgagtgctcagcctatgttacgggcggtaacttctctgggtttgatcgacaccccattgatatgtttgttaagccgggcttccccattgcggagattgatgtcgatgggtcttgcgtcattgcgaagcatcctggaaccggtggtatcgttgacgttgatactgttcggtgtcaatttttatatgagcttcagggaaatatttacctgaatagtgatgttagtgctgtgttagatgatattgtggttgaacaagttggaaaggataggtaagtttccttcttttattcatcgttgtgttggtctgcttactggagtctagagttcgtgttcatggagtacgaggctatgcaccccctccaacaaccaagctggctgtgttttatcctggtggtttcgaggcccagcttttactgaatgctactggatatgggtctgataagaagtgggatctgatcgaaagacaactccgacatttcattccgaaggaatccatcgataagatcgagacacttgaattccaaaggtacctttctctcctctttcagcttgaaccagtgctgacagaatatctagaatcggtgttcctgccccggaccctcgttcacagcgacaaagcacgacatacctacggatctttattgctgcagtcgaggccgatgccgttctcgctgtcgcaagagcaatgcaagaaatttctctcaaacatttctcgggtgcggaccaatatctgttatagtaatatccatactccaagctgactgaccactcaggattccactcctctctcgacatgcgcacagcagtcccacgtccattcctagcctactatcccgctatagtcaaacaggatgatctcgacgaggagatccacttcatcgacggacccgattctatcatctcgttcccaacaggtcatcctccagcatacaaagctctgcagccacgcgtaagctacaaccacaccccatccagcgatgaagtcgccctcctccaatctccaactcggtctattcgattgggagacattgctcttgcccgatctggtgataaaggatctaatctcaactttgggatctttgtccctgacgctactcactggccttggttgcggtcttatatgagcgttgaaagattgcgagagatgctcgttgatgatgatgactgggatgagtccttcttagttgagagggtagaattcccgtacattcatgccgttcactttgtgatttatgggattcttggtcggggtgtaagcagctcgagtcgattagatgggtttggtaaggggtttgcggattatgtgcgggataaggttgtggatgtgccggcggagattttggattgagtctttattcatcttgtgggacatatcatgggtctatctattagtgagatgcggaaattttatcatgaagtctagaagacacatattggacatgcttatcatgcttggaccaatgaacaatgcgcacatcgcatgaaacatcaattgttgaagcatgcacgatcattcatgccactgccaggatagcgacagcccaaggatccatgcttattgaataatttccctgtccattgaagacacccgtagtggtggtctgaatttgcacgttgaagggcgtgttgccttggtacttagggccagcaagcatctcaagtttaccagtttgggttcctggtatactcacttggacattctgatgttcggggccatagtttgccagtttcaagtagtattgtgaacctgtcttcgaagccacccagtaaagaggtccaaatcctgttgatgagtggactggaagaatggtgtcacccttgttggatgcgaacatcttttgcacaaaatatgaaacagaaggagtgacagagtcgggagtcgaactgaaaccgtatagggtgggctataagtaaaaacagcgcggtcagctatgtttgcactgttcctttaacgtcttctgggtagatattcttaccgaccaagacacaaaatcaaagtgttgcatcaagggtgcataagccaccattttcacaatatcactgttgcgttcgattccgatcatgtacacagcctcactgcagctgccctgcatgtagggccagtatgttcctgtctcttttgtagtattgcgacatccaaactcaccaatcatcactgattgattccgaggctggttgtcaaactggtcgaacaatttcacaaagtcatctggtgctcggtaaagatgcagatcaatgatgacattttcgggaagcggagatggcaaacacgaatagtccccgttggaagcaacaaaagtgatgtgcgggtacttgtcgtggatggccttgtagatttgattgaaacgatccggataggtgtcacagccacgggtgaggtcatcttcgttaccaatttcaataaggtcaaccttccacggatctttccggccgttctgagctcgcagtttgccataatgtgtcgaggagtcaccaaacagatactccatctcgttcatgatgtcgtggacaaaaggctcgaggtccggcccggagagaatatctccataagacttgcctgaccacacagccaggagtggcgccatgttcatgtcttcacaccaccacaggtactcgtccaggccgagggcatctgtattggggtaaaaccagtcgctctctcttcctggacggtcgactacgggtccaatcgtggtgttccacttccagcgagaatcaacttccaggccttcgaggttgttcccgcctgggaaccggagaaacgccggattaacttcatccagaaacgatgcaaggttatgtcgcaacccattttctcttcctttgaaagtgggagggaagagttggattaagccaaagttcaacgagctaccggcaactttcgatccatcgaatgtcaaatgccactcattatccccttctggtgcgtaggtagtgttgaacctagttttgaattccgtaaatttcgaatgcgtactcttcacggtcaaattgtgatcggcatataccgagccattatgcgacccaacaagccgcaggttgatggttcccgagtatttgcccatcatccagaatgaacagttgtatgtggcacccgtaacctgaattccgttgtaaccagaattggcaaatccgacatagtctttcaccccatccggcacttcgaccttgagcgaagacgtaattgctttgctgacaggctttgatctatcctgggagattgtcacatctcccaccggagcgtaggcagttaaaccaagactagttccttgaaatccattgttctgcagcaattgcccgtggattccaccatcgccttgagatagttagtaatgctagtgagcagcaaattcgagttccataccagaatggtccatttcctaacaacatcacggatcagcaacacagtcattcgcgcatagagttagctcttttctcacctcgaacataaccccatatagaagtggactcgacttattcccaccgtcccttgcgactgccagtttgacaggagcagttgaactattccctttcgccaacgcaccggctaggcatgtagccatagcaacaaatgtcgcgagaccggcgcatgacacagatccagacttcatcacgagtcagagcctatagacaagtatatagcaaagagttgcagaggagtgaaaagtgccggcaagaatccaagctcgggaaggtcaagcttttcaagacgcactgcccctgctttgaagaaagtgccttgcactgctatgggtgtgattcgttcgttttggacctggcctgacagtattctccacagaagcatcatggaccctgagatggagcccgcatgcaaatcaaccggtcataaagcctgggatctaccgacatgtagggaaccacaacgagcatctttaaacatcccgttggatcatgctatttatttcttgcacaccccaatttggcagtcttcctacatcgtggcttatgtatctgtgtgcactgcgcagacaggtggagagcagtcatgacgtcggataactcccaaggtcggatcgggatgttagcctgagcaaggcatccgaattttgccttggcatttaggcgaataacaagtcttgatatttaccagaaaagatatttcgcttgcttttatcagctcacttctgataacaaacaaaaataatgatcaaagacgagactaagtctaagaaggcggtgtctgatctgccatctcacatgtctctatttccaaatcgggattagctttcttctttccctatctaagcttgcctcgatttcatcaatattcttctccgactctgaacctcagagtgaaagatgaagtacattgtggtatctggaggtgagtttaacagtgatctgccagaagtggctccgccgttagcctgcggagaaaagcggggcagactccatatctcacgtttagcctttcgaggtataacagacataatagactgacatctctaggcgtcatttctggggcagggaagggcatcgtcgcttcgagtgcaggtctgttgctccaaagcaaagggtttgtcgtcagcaccatcaagatagatccctatatcaacatcgattcggggactatgagcccactccagtgagttctgcagatctgagcagcttctgcggatccatttattgatttatctagccatggagagatctttgtgacagatgatgggggtgagataagtcttgacctcggcaacttcgagcgttacctttcaaccactctccagcatggtcataacatcacaactgggaagatctatctagatatcatatctagggagcgagctggcgattatttaggcaaaactgttcaggtggtgccccatgtcaccaacgccatccagaattgcatcgaacgggtagcgaagatacctgttgacgaatcccaagccgagcccgatgtgtgtatcattgagctaggtggtaccgtgggggatatcgagagttcgcccttcatctacgctcttgctcagcttcgaaagagggttggcaaagaaaacctcgttcaaattcacgtagcttacgtccctgtcgtgccgtaagctcttcttgtttcaggcgagggcatactgctggaatctaacgccaggctaggccgggagcttctggtgaacaaaagacgaagccgactcaaagatccatttccgacgttcggagcgctggattgagtccacttctagtatgctctacatccatgtgtatcacgcactctaagctaattgaaaaaaggttgcctgccgctgcgaggtgccactagatccaggtaccatccaaaaaatcgcgaatatgtgctcaatggaaccggaacaggttatttccgtacacgacgggccaactacatatcacctaccgctactcctcgagaagcagaatcttctcagcatcctctgtgagtatctccaacttccacttggtcagacacccacccagcgtatcgaacaaggcaggcgcacgtggagtgactgggttcaccttgttcaaagccaagatactatcaccgacacagtctcaatcgcccttgtcgggaaatacacctccaataaagatgcatacctcagtgtttccaagtcaatcgaacatgcagccatgtactgtcacaagaaagtcaagattgtatggattgactccgcgcatctcgagcaggagacctatcagaactctgcagtcaagtatcacaaagcctggcatgatctctgtagcgccaagggcattgttgtgcctggtggttttggtactcgcgctaccggcgggatgatcaaggcaatcacatgggcgcgggttaataaaaagcccttcctgggcgtatgcctcggcatgcaactcacagtggttgaatatgcccgtcatgtgatgggtatctcggacgctgggagccaagagctccacccagaatccaagaaccatgtgatcattcatatgcctgaacgcaatcaagagaatggccgtgacaccatgcgtctgggcaagcatccatgcatcttcaaggagggtactgagtggtcaaagctacgatcgttgtatggccccacgatttctcaaattgaggagcgtcaccggaaccagtacgaagtgaacccggaaattgttgaggaacttgagaaagccggtcttgctgttgttggcaaagatgctaccggcaagcgtatcgagattgttgagattcgcgatcatccctttttcgttggtgtacaattccaccctgaatacttgagccgtgtgttgcggccgagcaaggtgtttctcggcttcttcgctgcggcggctaagtgcttggagaaaatacctatggcattgcaacagggccggcgaagccttgcggaagaagatgaagaagcgatgggcaacttttgaagctcttagcgtcatctcattggttggtcttgttcttagcgccggcgttttaagttgcattgacaactaaggaatcggataatttcaattagaaatcaatactttcattgttttactttttcgacgaacatttataataggaattagaacctgcaaattcagatagtcgtgcagttccaatgttttttttcctgacaactacataaaagcttctcagtctataccacaacataatttcactcacatagaattgcaaagataaccaactttccgaacaaagcagcatgaattactgcagcaaagataaaacctctcaaagtaggaccacctgcagaaaatgaagtcgttatgaaagtcgcctacaccgccgttaactccgtggatggaaggcaagatcttgccaactttcaggcatttattctagggtgttgttagatgtattattctaaccagattttagctacaagtataaacatgcatatgaactctgtagtaaaggtggatagcactatgactgactttgtttgagctttacatgagaaaatagaagcaaattctactgagtagagcaatattattatgtgattgatgtatttgagaacttgagccgatctagaaggtgagcagttcttccatggccatgtcgtcaatttatttcatgcaagagaaagcccggaatgcaagttgagaaagccaagcgaggagaagggaaacaaacacaatcataaccagaatccgaagagggatggagatgcacgtggacagtgaagttcacgacaagactcaacaaggtagactaccaggttgacattgacaccgaggatgatgaataagaagaagaaagaagtgggtgtataatgcatatggtggataaggataatgtgtacagagaatgtagaagaaaggtccgagcctaggttttaggtcagatcaaaaccaagacagaacgaaagtcctgccctgaaaggctggaaagaaaaggctttgccaaattggaccaaagaaggtggtgaggccgggtaggagggagggaaggtgtcacatgttgtcggaggggctgcgttacaaggccaagacaatcggcttaattcgtcgcccgcttccagaacttccagccctctctcctctcctctactccgacgccaacaagacgctcaataccttcagggccctcggcattttcgaacttctgttgatcgatctcttcacctccctcttcgtccgatccattacgtaggacggccgggtagagaacaccgacaccgtcaccgccgagggtaacctcatacgtagtgaaaccctcctcctcaaacctccgttcgagatcctgcttgacttcggccttcgcgttgggccggaggagggtaatggcacatccgccaccgcctgcaccggtcagctttgtccagccaatgtcggcgtaatcgacaagttcacgaatacgttcgaggcgggggtgggagacgcccagggagacaaggaagccgtggtttatacggatcagggttccgaaatgggcgagggtggcctcggagatgccctcgaagctagggtcctcaatcaaacgttgtgcagagctcgtcacttgatcgatgccgttaagtattgactccgtcacgatggagtgagcgtctcttagagctccgactttgtcgacttctgtctttgtggaacgcgcttgttgggtgtcgacaagtaggagagggagttcggggaaagtaggtagcgagacgactgttggaggtttcgtgtaatcatcgcgtcggaaaatcacagccttgccgcctgcggccactgtgttatctaccccactgggattgccatggatgcagagctcgccgacgaatgcccagcggttgatacgttcgatctgtgtctctgcctcctccggtggctggtctgggtggggcccggcgagggtacggatttgaagaagcagcgcagaactgagacagacgcagacactggcactgctgcctaggccggctccggtagggatggtggatcgaagagtgtagatggcgcctgggctttgcggggagcctaaggagaggaagagatagaggaacgaggacgcggagcggatgtgaatattgcgctgctcctctgggaggcctttagagacgccctggaggtgtggttcgattgcctcgacgagttctgggtcgagttcagtgacaaggctgtagtaaaacttctttttggacggctcgtggaacttgtcccaaggtagggtgtcaatatcccaagtgtgactaagacccaagtcccggaagttcagggttatcgtgcgctgcgatttggaaagggtagtgacaagaaggtaggagcgaagagagatggctgcggccatggcagccttgccgtggaccacagcgtgctcgccaaagacgataaccttgcccggcgcggacaccatgaaggtaggtgccatgggcgaagaggccttgcgagtcattatcgggcggtttcgttccccagtagcggttgcttcgtgtgtttctgaggcggaggagacggaggcgctgtcggagctatcgtcccggacacagtttccgttcatacccaaggggatgactttaaccgtgctttcgggatggaaatcgactgtacgacgtgaaacgggaattgtggcccccataccgttcaatgggcgagtggcattctcagtcatgacagtggaattcgaggggcgagaaaggggaagtgattaggaattaaaaggatagaaatagaagacaagtcaacataagcaaaagaagaatgagggggggagtagaagaatagcctaagttagagatagcccgagttatctggagtaagcaaatggagtccaaagttgggggagaagtgattgaagctactgggtataccagggaacgagagagaaacggtccaatcacagccacaacaataccaattggtcatattagacctagttaggctgactagttagctagttagttagctgttggcctatttcgtacttcgtttcccgtctcgattactcgttatgtcccttcgtcttggacaattctgcctttgcatatccaagtgcagagatttttgtggcgtgcagtagcgccgggatcgtctctatgccttaatacatacttccaatctaagaaaatctaatgtgctatgtacaatgctgtattcatcacaaattcatcgtcacggtcatactgttactatgcaccagtaaacaagggggcaggccggtccacagaacatccaggtcactcaaataagatgcactgtcctcggcactaagcgaagtcccctccacgggagacggcagagtcgtgaaaataacggcggtatcaccactctgctggaccatcaactcgttcagaatcaaatgctgtgctcgactcgggaggtcattgaaagacaatggaaccgacgctacaccagggtatcctgttgcatgtgtatgtgaattgctgggggcaccgggggagggagaagacacgggagatgggcgatgggagtagatagagtctagcttgtttgcagatcgtggaggtgagctttgcgccgcgaacatgatagacggtccattgccgtcttcggcttcggtgttcactttggcttcagggataggtgaggagctgaaccgatttctggaggcagaacggctgatggggggccgaggacccggggtattgcttttcggggagccatcgtcgccagtctcaattatagatgggattatctggttggatggcgttgcctctgcttgagggctcgcactcactggtgtgctcggggagtctgcgctagggctgcaatcatcggtcttggaccgaccaaggagtcttgaagggccgggaacaggtacatcctcatttcgagccctggctatgtcctctccgccgtcttctggctcgctgacatacgcttccagatcgctgtcgtcgctctcactcgggctatcggagctgtcgtagtcgacgaacgcatccagcaagcgatgcgtttgcatgccaaggttcactccgcctagagcccggaagctggagacagatcgtctgcgacgagtggactgaatcagtttcctcaagccagtcacccgatgatacaaaggtttggctccactgtcttggctcgatgatccttgccaggtatatgacttatcaagatggaaactgtcgctggttctatccgaatcctgcgggtcctgatccagcgcacgagctcgtaagaccctttgccaccagtcctccccctgtagagcagaattaaccctctcttgggcatcagctgtaaccgaagtgccattcacgatggtttgataagcctggagatcaccgcaggcaagccagaagaccaagacttcggcttcaatgcgtaatttctcaaggagggcctcaactcgcgctctttcatcttccaaatcggtctcgtactcgacgaacaccgcaactcggattttgtatgtcttcttccacgagggaacagtgttgagaatacaacccagttgaaggatcaaagtgtatgtgtcaaaattagtggtcagcacattttgcttgctttcactatcagccccaagctcggcggacatttggatcggccacaaatcaatatacttcttagtgtgacgaccgcgggggtccggtagctccagatcttcgaatcccttagctacggcaacattgatccgaagcttgaataagagatcttcgaggatcgtgacataacactgcccactcatgggcgggtttgccgccccagactcgctgggctcctcggttcgcgtgctcgagtggagcgaatggcgtctaacccttgaatctctacgaccactggtataggtttcaacaagcgactggtccgatcggaattggtcaatcacaacgatgttgggcctcatgccgcccagtccggaattcaaaacaatatttcgcataccccattccgcagccggggaaatggcaatgttgacgaaggctttgatcttggaatgctcgacgaattttgtccatgctgtctgttggcgacgtgcttcggggacagctgctgaaaagtcatcggtcacaagaacatgggccagcacaaacaaagatcctttcttcaacgagttgcagaaggagaccattttgtattgtctgtcgaggtcgctgacaaagagcaggatctgaggacgccagaacttgacgtgctcctgacgcaggcgaagcaggtattttcgcacttgatgatagatcaaactttgactgacatcgccccaaggcttgggtggcgagctataatggatcagcaagaagagaatcaccaggatgcctacacatcctgtagcgtagacaccgtccacaaaaaacatgctgatcccactgacgagcgttccagccgctgcagtctgccagttgaagtagtggaacgacggacgaaagttgggtgcagagccaattttcaagaggaaacacgcgaggttcgtcacaaggaaagtcatcaagtaggtcatggtaacaaaagacgcgatgcgattgatgtcgaagagcattgtgatctgagcgaacacaaaggtcacaatgatggcatatacgggatcgtcggttttatgtgtgccttgggcaaatatccctataccaggcaagaggctatctcgcgcaatagcttgaagaagtttagctgatccaatcacgcccatcagggcagaaaagaaactagttgcgaattcaccgagaagaatcacactatcagaggcattcacctacactcaattagagcgtgcttgtagttattctctcaaaaaagaaggacttacgatttgtataacattcacgttattataaaaagactcccgggtcaccgaggccgccatcgcaaggatgacaagcccatatgcgacaaaagtcaaagctaacccagagagcgtacccttaggaatagccttgctcgggttcttcaaatcaccagacatacttgcacctctgatggccaattagtgaaatggggctgaaagtctgctgtcgccaacttacgcaaaaatacctcctgttgcaggaaatagaatgccaaaaaggtcttggaagttctctcgtccttttatttggcttcccgcggctcccttggttagatggggtttgagattccccatcagagttttcaaacgaattcccgtgaattccacgccctgacgggggactgggaaaggcttcatgaaaactgctgagagcggtatgctgaaagttgccacgagtagtatgaccaaaagcccgttgcttgccctcgcaaatatagaacttcctgccaagcaaaccccggtgcaaaataccaatataatagttccccataggtactgccaccaaaagccttcctccaggaagttggcccagtccccagactgcgccccaaagttctgggtaaaacagtccactaaaccaacggcattcatgccggtattgaacacatagccaagatagaatacaatgccaatagagccaccaaattcggggcccagagatctagaaataaggtagtaggcaccaccgcctcggaccgttccgtttgttgcaattgcggatagagacatcgttgtcacaaggttgattgtgtatgatataagtagcagcccttcgatgtatcagccgtggggtcctgactttgcgagaacctatgctcacctaatatgcccaagacaccagcttgtcccaggatgaatccgaaccgaaggaacataagaatgctcaggacattcaatgtcgtgggaacaaagacgccagagaaagtaccaagcttcttcggctcatccatcgatcgggatcgatgtccactcttgtccttcttatcggcgcgggcgtcacgaagggaatccgcagacaggtacacattttgtgaagtgttctcttcaccagtctcctgctcttgatcgccatcccctcggttatgccaccaccgagaaattttctggaagtaattcatgggtgaggaatggcgtcggccctcaattggttctgccgaattcacgggctcatacgggcgggcccatggagtcggtgaccagggtagcagtcgagtacgttcgtcggagttagcatggtccgagtcccccgggtcaagacgtgagacatcctcttgagcagttcgagtcgcgaaagttgggcgtcgacgggacaaggagtcggaggattctaaggctcgtttcgccatctcagttgcaaaatttatggtatgagcatgaggacataaacaacaaaataatctagataacagaagccaatagtcccagcaagactattgagtccgcagagacggcgctaatattaaatgaacgagaaggaaaaacaagcggtatcaatagatgacgttgataggtgcaaacagtttccagtttgcatcccgtcaaccgcacttaggagctgatcggccacggactgcttggcgctatttttgtgtctcaaatcctcctcagttacatcctagccttttcactcgaattcttctccgaggagctgactgcactattgctttaagcttccggccttcttttcatgcgcatttcccaggcctaaacaaggcatcctgctaggagctaacttgaccctgaggccaccttcaaaatggcggataatggcgagggtccatccctaaatccagctcgatctgtgccgatagcctcgtcctccgcgcgctcgaggtcccccgcacctgagttcggtagcagacaggcttccatggcacgcctcgcatccccagtgccctctccttcattaggaacgtccttgtcatcacgacagggtattccggccagccgacctgttacaaacaccaccaccgagcaggagttttccagatcgattgccaatccatcctcgatccccggtcctggacattctatccttgcatcccaactccaagaaagcctcggtcgttcgccgccgagatttggaactccgtcacgacacaacggatcccctgcggtgcattcgacgttagataaccgaccgttggcctctcagtatggctctttcgatactaaaaacggagtcgactcgtcgagcatagccccggtagaagaccctgaagttatcaagcggcatctggtcacggaacacacagataatcagtcggaaattgcgaccagccttggtggcgaagatactttctcgagtctgcagcttcaaggtggtgatattacacgacaagtttaccgttgggcggaggatgccgaagctgaagccgcagggcgattcttgcgcagcaagagtttcagcgtcagtcgaccaaggccggagacggatacggaagacattgacacaattcgggtaccaggagggtttcgcagggattacctacgaagagcagctggaagtccacaccgcggagatgcccacgggtcaaacgtagggccgccccatggacacggcgcacctcaactgccgactaccagcttcttggagttcttgactctctatggacactttgccggagaagaattggaggaagatgatgaggtactagggccggatgagtacttttcgtctgatgcctgggacgagccagatgatggcagagagtctggagaagacgcagcgctgttgccgcctgaaacaccgggtcggaagaagagaaagcacaagcaacgctcaccggtagggacaactaccacaacaggtgcagtactcttgctgctcaaatcctttgtaggtactggtattttgttcctacctcgagccttcctgaatggtggtatgctctttagtagcatggtgcttctgggagtctcgattctcagctattatgctttcattcttttggtcaatactcgcacgaagatcgaagggtccttcggtgacatcggtggcattctatacggcaagcacatgcgacgcatcattctcggatcaattgtcctgagtcaattaggctttgtggcagcgtacattgtcttcgtctcgcaaaatttgcaggcattcgtgctagctgtgagcaggtgcgcaacgttcattgacatcaagtacatggttttgttgcagctggtcatcttcctgcccctgtctttgattcgggacatcagcaaacttgggtttaccgccctgattgctgatgtcttcattcttttgggtctcctatatatctactactacgatatcagcactctggttgaccagggcggcatctcagatatcgtttccttcaatccaacaacctggtccatgttcatcggtaccgccatcttcacctacgaaggtatcggtctcatcattccgattcaagaatcaatgaagcagccaaacaggttccctggtgtcctggccggcgtcatggttctcattacctttatcttcctctctgccggtgccctgagctacgcggcgtatggatcggcaacgaaaaccgtcatccttcttaacctcccccaggatgacaaatttgtcaacgtggtccagttcctctattcacttgccatcctgctgagcactccgttgcagctcttccctgctatccgcattatggagaacgagcttttcacccgcagtggcaagtacaacccatatatcaagtggaagaagaacggcttccgtttcttcctggttatggtctgtgcccttatcgcctggtgtggtgcgaatgatctagacaagttcgtttcgctagtcggaagctttgcttgtgttccattgatctacgtatacccggtatgtcttatcatgtgtcctcctaatcaccacagaactgtatgactgactcagtatatcactgtagcccctcctgcacctacgcgcttgtgctgcctccaagcgccaggcggttgccgacgtaactcttgctgtcttcggcgccatatgctgcgtctatacgacgtacctgaccctcatgagctggatgggccctgacgtccctcaaagcccgggatactgtgactctctttgaaaaaaaaatctacattctatatcatgtagagcgtggcgagacaggttttgttgcattcctttgttctgtctcaaccctagactggcatgtctatcattgggttctcatatgttccttcaacgcatggacggaggtcatactagggacattattcacagtctcggtcaaactgtgagtatagtgggcgcattggtgtcagactaccctttctgtatacatactttcttggttttggatactatttactctaccatatttgtggagcttcctttagaagttcatctgaccgggaataaatcaaggataggacccagcctatcaccgaatcccgaagttgtcacggagttcatcctaaaaggaatatgattcgagcgcaacaatatagagcctatgtacagtgattgtcagcaaaccggaactagattgcagccagcgtcgatatctaagcgtctcccttaaaaccgcaggtcttcctctatatttctcctcttttattattggccggggctcatctggtctcatgacataaacccgcaggccatattggtaagaaggtgcaattctgcgaacgagacagatgctatagccccaatacaaactgaaaggaagcaagcacaaccaattccttctcggagacgattcttaagcaccagcctcggcagctgcgctgcccttagcagcctgctcggcgagctgcttttcccggcctccaaacctacaaagtaggaccaggttagtaatcacgattatagatgcttgtggacgatgacaaaagccaaacaaggtgttgggggatgaagcgtacttccagtagttcagataacggactgcctgagtaccctgggcagcgaagttggttacatggcatgcgaagaggaggtagttcttgggggtaacagcgagggagtagcgcatgaaggtggcagcgtagacgacgagggcaccggtcatggggccggagatgctgtgaagatagagctatcagtacaggttctctgagactcaacagccaaggatgagatggaagatgaaaggcgaagctcccattattcatcggataaaaacgtacatctcagcgtccttctgtgtgtccatcacggcggcaatggggataccgaagttggagacagggccccagaagtctagagagcatcataggttgtcagtaatttgtgcaattcatttacacttcatttctttagaaaattgcaagctcgaaggccgaaagcgtgtttctcccatcctcaacgtcgctttcagtgctcagtcggcgttggccgacctcgggacggcaatcgcgccgagagaaactggggtcaataatacgtacgggttgagcagacatagtccagcaccgagttagagcggatcttcgcgttaattgccttgatagcagccgccattgtgaaattgctgagagttatcacacaggattagattcggagaaggaaacgtcggtatctagaggatggggaagccgactcaccggctgtcggtgtcggcgatgtcacgtgcaatacattacattatcatctttgttgaaactgatgtattaatatataaactttgattgaattttagtggttatgtataatatggtagaatatggtagtccgaagctcaatttaagacaagtatcagagatatatatcggattgacctccacttcgaccatccaaaatctatttccatgttacgatctaaccaaatcatagagaggaaaacgacaactagttactgttagatataaaacgccaggctgtcacataggcctacatggccactagagtgcaaggaaggcccggtacgaagtatgttgggtagtttagatagcatatgatatagaagacacagcataatcgagagaggaagtggagatgaagaattgggatattaaacggttgaattgaagaggctcgtttaaaaagctagcacattttttttgacttaatgcgtaattcaagaggattttggtcttttttgtcccgttcctcgacacgacctccatccatgcgccgcaacgcctaacccagtagaactcagggtgatctagcctgtccgcgtatcgttatctctcgctggaggtgttgacaatggctattattctgcgccgagccgcccttgtttctttcggggtgaaatcagatcgtcgataatttgaagcatagaatactgcttcgtacatatttccaattacctgccaccgaatccaggaggggggtatccgcgtccctgaccgggaggctggaagccaggaggaggttggaaaccgggagctatgaaaatggaatatcagtatgggagacgggatgggacagttatctctgcgcaaacttacggggaccaccctgaggagcaaatccaggaggaggcgcgaaaccagctaggaagaaaccagtcagtttgagtctcagtcaacctaggaaaatgggagtatttacgaggtccaccgggggggcctccacgtccagcgaatccgggaggaggggcaccagggaaaccgccagggggaaatccaaagccacctgggggtgggggtccaccaatgccggctgcagggcctccgagtccgataggaaggccgcggccagcgggcttgctgataccagggcccgcggcaagagtggcagctgcgccgggtccggcggtgccaagtcgggcagaggggtcggcaggcggaggaccttcaacagagcaagagacgacttgagtaccgcgcacgatagttaggccgaggcttcgcttctcttccgcttcgaccagcggggcgtttgtgggaccggcagtgggcttagatttccgcttgatgcgacggaattcttctgtgtcggcaagaacaaggttcatgtgctagataacggaaagatcagctgggcgcctcggtttccaaagcgaagagaaataccttatcaaaggcaagcatggaaccagtcatttgacgtccatcgttcaatgttacgcgcatccggtagttaatctggaggagttagatacttcaatcgagtactgaaattgatttggaccagactgacaaggttttgctaaatgagagaagttagcgacagccattgaccaaacgggtttcgggggtgcaaatgggaatgagaaactcaccatcttgtgggaagccatgttggctatagagcgcgcacggatgcgacttaggagactgagtaatagagatcagtagaaagagaaagtttttctactgcggcggatgaagcaaaagtgcgagatcctcccaaggatgcgaagctcaagcttgtcaggtgctgccagttcttgatactggattacctaaaatatgagtcagcccaggttcgcaattttaatgcctcaggcagaatgcgggtcagaaatattaatgactaagcgcttaaattagactcattacctaagcagcaatcagggcttccaaatcacgtgtgggaacccacagtccacactttctctttttccgcgatcacttttgtctcctcagtcgacaaccacttcacgcccaaccgccgtcatggtacgttcagctccttgcaatccaaaccaagcattcccaatagaatgtattgttttatgtcattccatttgatatgggctgcaacctggacattttcgtcttgcgcgcacccaatcttcaattccctgaaatatctattctttgactagatacaccatccacaagttgagactaacatgatgcagtccgcccaagttgctaaggccgagaacccctgccgatcccttcgcttgtcgaagttggtcctgaacatctccgtcggagagtccggtgatagactcactcgtgccgccaaggttctcgagcagctgtccggtcagacccccgtctacagcaaggcccgttacaccgtccgtaccttcggtatccgccgtaacgaaaagatctccgtccacgtcaccatccgcggcgccaaggctgaggagatcctcgagcgtggcctcaaggtcaaggagtacgagctccgcaagcgcaacttctctgagaccggtaactttggattcggtatcagcgagcacatcgatctcggtatcaagtacgatcccggcattggtatctacggcatggacttcttcgtctgcatgtgagtttcttactgatcaccggatttggaggcaatttatctcggatattaacaaataattccagggaccgccccggtgcccgtgttgccaagcgccgtcgctgccagtccaagatcggtgtcaaccaccgcatcaccacctccgagaccatgaagtggtacaagaccaagtacgatggaattatccgttaagtctcaaaatcagagataatggctgggtagggcctgtgaagtacgaggtactcgacaagaaccaaaaaattatcccgagtactcgaggaaacaaaatttgtggacgggcaccccactgccagtcggcgggcccctttgatctctgcatccaacaatggtcttgattttgtactccggcaaccaggataggcgtgggagagacatgaattgattattacctttttactgctgcttttcccttttcacaatgaggcttcacgagaggtgatgttttccgcataaccattgttgaattggatggcggacgctgggtttcgacctagtgtctagccaagactcgcttgagaatgcctcataggcttcgtcaaagagtcggtctcttttccagcgagaattttctcgtggtggattgagtaccttgttctggcctatcttgtctgtccttatcctatcctcgtaggtgcaatttgcctggcatagaagtaaatcaaccagtcgtagcttgtagattgacaatatggtcctccgatctgtcgggaatgccgacataggactgtccacgcttatacaatcatactttgtggccgcttcgacaacagccttttctacagggtggtctggcctatcctcgaccataaattgggccataatggcgcgaactggccatctcgccatatattttgttatgtgtatcaaccgaacctgctaatttctacaacctaggcaattaacatgtcccgctggtcgatccccgcgtcttttaagtccggtccacgtacgacttgccgagtagctcgtctcttcaatgtacatcagtcaattatgaggcttttatagaaatacaagaagccactagaatttatcttttgtatggatgcccatgtacaaacattgagtaaagcccgtatatcgtgaccataatgttgaatgttaggaatatatcttgattctaagagtttagtaactagttacctagccagtcaattatttatttgtttggaagaaaaccttttgattactatcctagggttgaaaattgccactactcttattttaaacatcgattatctgtaaataaacagtctggagcatatacaatcaaggaccatgtatggtatgctagctttatttcctctccaagtaacactgtgtggttgaggtataagtacaaaatgtacattctagtttacgtgtttcacgttggaccatgcgaagagccaggtatagtgtcatttcattctctcttattgttcttttgttgtccttgacgtaaatgataatgtaaagtatccagggaagatatagaatatagtaggtgtaagcctatatattgcacttcccagcatggcgaaaggaccagaaatcaccaccactaagactgaatttacaattttttatccaccatctcaatattctcgctactcaactcatgtttatcttcacctgcttccagatccatggttttggcatcggcagcctcatcaactccagccacaacactttcgaaccggcgaccacgtttctcaggaccaatagcagtagtgatcatgataccgagagcaatgatggcagttgccactgccatcacaggcccataggcctcaacacgatggcctgttgtactagtaataaaggtagactcggagactgcgtttataatctgcgaagatggcgaggaaatcatatttccaatctggtatgtcagacccgtgaacgaagagcggaacgctgggggagatagttcggctagatgaacgggaatgacgccccatgctccctgaatgaagaattgcatgaagaatcctgtcacactcagagacctctcgccttctgggaggatccatgccgggatgaggactccagatgccaaggcggcgacgatgattgctcggcgacgaccaaagaactgggataggtagccgatgatggttccgcccacacaggctcctgtcttcatcagaatagaagcccgtgaggcgccttcgttatcaagctcctttgcagtgagcatgaatgtggtgtacgaatcttgggatgtgtgggaatagaaattgaactaacgcgggacaaattagacaaatgctgataggagccggaatagcggttatgacatacccaggtcatgagaatgacacagtagatgcacatgcgccactccttgcccaacatgcttactgtttcacgccaaaactcgcctgcattcattgttcgcttgccggatttcctggcttcgatgaaggactgcgactcggggaagcagatgcgaatgaggccaattgcaattgagataccggctgcacaggaatgattgttagtgacaggtaaacagtattcgatggaatagtagactgacctgcaatccagaatacggtcttccaagtatctgttccaccgccaacaccaaggttggcacatgctgcaaatacatatcctagtgaatacccttgttgaaggattccagacataagacctcttgcgttgacactggttcacaagatgatcagcaaaagtcactcagccctggatgataatactcacgggcaatgttccaaagccatcgaaatagcatttccgtaaacgccacccatgaaaagaccaaagagacttcgcacagccaagaactgctggaaggtcttactataaatggtggcgatttgcaagattcccagaataatcatattgagcaccatgggccatttacgaccatatttgtcacctgccagtccaaagaatgcagctcctatacttcgcagcagcagagtcagagtaatggcagtcgtaatatctgttttggacttgtcgtagtatttcgccagctttactgtctggatggagagggcatggaagtcaaatgcatcagcagtccaggcagcgagtcccaccagaaagaacacccagtctcgagccgaaagctgcgccatcagactgaaggggttcttgataggctctggggattgccattctgcgtatgactctccgtgttcgttggtcacctcgacacgttgcttccagatgaagagatctccgatggactgacgtgctgtggcgagcataccatcaggaatggggtctgccctttcattggaagatgccattatggcgatctatcaagagaaggagacgagaaaaaaagaacgaaaggtcagaagacagaagaagcaggcaagtcaagctgaccaatagaaaaaccagatcactttgaacaaagcggactgactagaaaatttggtagtagactttgtgggattcttctggaaaatctgtggcatatccctttcaatttatatgtcggcgctcgccattttataggtacacaccgcgttgtcccccgcatctccatcccgcatttcccccgtgtcggaaaataacaaatgccgctgcaccccaggatgcccgagtttcggactgataaaatgccactccgctggtgagccaagcggatgccaagggcttggaagcaccgtgcctccaatgccaggacaggacatgagcaacagaccgcaccacacactttacggctggcttggcgtggagatgaacttgaccagaggtcgttccggacttggctctgcccacatagacaagcaccagtaagccgcgtggcgctgtgcgcgtggtcattgatcggttacgccgagaaccttgagtgaaaaatgggccgataggaattccagtgcctccggtttggtctttaatgtcagtttacggcgaagggcatcggaatatagcttccttcggggctctagtgggctctagtgggctattagcagtcggttatattgtcttggtctggggaagtgtgttgggggcccactaaagctggtgtaatagttagctcacttcatatgtagtttttttcatcttcaaaaatcagaacaaataaatctgtaacgcatactgaacgtacagattgaggaaggactaaagggacataagcgctgctcacacgtgataacttccgaagaatcgaggcgcaatggtaatactggttagatggcaggatccgctagagtggaactagttagttaaatgggccaatcaatccctaatcctgaatctcctgagttcgaaagtcttggctttagccgcgagaggctacaacttgctgagcttggtcaagggtaaaatgggctggacatgcacatcccttgcgttcagggtccatggtttaagggccagcttatattttcatgtaggcgtccacagcttgcatttggagaaattgggtctccttagaattagtgatatatgttcagagggtacggagtactatttgacttgaaaactcagagaacgtggccaggcgggtgagtggtaagaggctagagccacctacgtgttggtaaacattgtgaaggcggtcagttatacctctaacataggtagagatatgaacttgagctgacagcatacactctcaggttaatttgacaaacgagatatcaatgagtttgctacctaactttcactttgctctctctttctttttctttcctacctacaaacactgcatctgaaagagacgatccagtaagcccccgtgtcacgtgatcatccataagcgacacctcagcaacgacggcagcggcctcctgaggtcacttccgcatctaccagatctctacccccctcctcctctcttcatacatcttcttcttcttttcctatttcgtgctcccgacaatcgcatttcatcaccctttttcatcatacttcaattcttttgcctttgcgtggcgtttcattcagcggactaggtcgtactgcggcctacgtaaatatggcacctctccctatcaagttcacagagctggtcaatgtacgtgcctacccctcatctctatcctataactattgaagctttgaagctgacctgcgcctgaattgtacagttgacctctgtcggcattgcggtatgtacaaccaaccatgatcttcgtcgagctttgagacggatgcaccggccgcgcatcgcaatattcctggatatgttaggattgctactaactgttatgcttacagccggcatcaattggcttcacttcatgtgtaagttgtctaatgtcaccttgcgactgaccctcaaaacatggatgacaaggcccggctaacttgacattctttcgctttagacactagaatctgatcactacgtctgtgttcgccaaaagctagacgatgatgccaaaccagaggtcatcattatcgacctcaagaacaacaatgaagttctacgacgcccgatcaacgccgacagtgcgatcatgcattggagcaagaacatcattgccttgaaggctcagggccgtaccattcagatcttcgaccttggcgcgcggcaaaagctaaagtcagcgaatatgaatgaagatattgtctactggaagtggttcagcgaaagatccctcggtttggtcaccgactcagcagtttatcactgggatgtctacgatgccacacagcagaaccctgtcaaggtgttcgaccggcttccaaatcttgcggtatgtgatttgccacgtggatacaacaatggaagcccggtatgctaacttgcgtctactctttagggatgccaaattatcaactaccgcgtcaatgccgaggagaagtggatggtcgtggtcggtattagccagcagcagggccgggtcgtcggatcgatgcagctttactcaaaggagcgcggaatctctcagtttatcgaaggtcacgccgcctctttcgctagcattaccgtcgagggctcccccctacctcacagcctcttcactttcgccgttcgtacccaaacgggtgccaagctgcaaatcgccgaaattgaccaccaagaacccaaccctcgcttccagaagaaggccgtcgaggtgtacttcccgcaagaggcggtcaatgatttccccgtcgcaatgcaggtgtctagcaagtacgatgtggtctacctcgttacgaaatatggcttcatccacctttacgatctcgagactggtacttgtatcttcatgaaccgcatctccagtgaaacgatcttcaccacgactccggattccgagggagccggtctggttggtgtgaatcgcaagggccaagtcctggccgtcagcgtcgacgaaacgaatatcatccagtacctcatggagaaccccgccatgtccggtctcgctatcaaacttgcctcgaaggctggccttccaggtgcagatcacctgtaccagcagcaatttgactctctcatggcctcgcaggattacgccgcagccgccaagattgctgccaactctccccggggtttcctccgcactctggaaacaatcaaccgtttcaagagcgctcctcaaaccggtcagatgtcggtgatcttgcagtactttggtatgctgctagacaagggttcgcttaacaagtacgaaagtgttgagcttgtccgacccgtcttgcagcagaaccgtaagcacctgcttgagaaatggatgcaggagaagaagctggagagctcagaggagctcggtgacattattcggccatacgacatgtctcttgctctgactgtttatctcgaagctaatgttcctaacaaggttgttgctggattcgcggagactggtcagttcgacaagattcttgcatactccaagcaagttggataccagccagactacacccagctgcttcagcacattgttcgtgtaaaccccgagaagggcgccgagtttgctactcaactcgccaatgaagaaaacggtgcattggtggaccttgaccgcgttgtcgacgtgttcctgtcacagaacatgatccagcaggccacctcgttcctcctggacgctcttaaggacaacaagcctgagcatggccacctgcagactcgtcttctggagatgaacctcgtcaacgccccccaggtcgcagacgccatcctcgggaacgagattttcacacacttcgaccgtccgcgtatcgcccagctttgtgagaatgccggtctcatccagcgtgctttggagaactcggatgatccagctgtcatcaagcgcaacattgttcgcaccgacaagctgagccccgagtggctaatgagctacttcggtcgtttgtctgtggagcagactctcgactgcatggacaccatgctggaatcgaacattcgccagaacctgcagtctgtggttcagattgcgaccaagttctccgatcttctcggttctaaccgtctgatcgatcttttcgagaaataccgcactgccgagggtctttactactacttaggaagcattgtcaacctcagcgaggaccctgaagtgcacttcaagtacatcgaggctgccaccgccatgaaccaggtcactgaggttgagcgtatttgccgtgagagtaactactacaaccccgagaaggtgaagaacttcctaaaggaagcccgcctgacagagcagctccccctgatcatcgtttgtgatcgtttcaactttattcacgatctggtcctgtacctctaccagaatcaacagttcaagtcgatcgaggtctatgtccagcgcgtcaaccctggtcgcgcccctgctgttgttggtggcttgctcgacgttgactgtgaggagagcatcatcaagaatctgctttcgactgttgacccagccgttatccctatcgatgaactcgttactgaggtcgagagccgaaaccgcctcaagttgctcctgcctttcctcgaggccactctggccactggaaaccagcagcaagctgtctacaacgctctcgcgaagatctacattgacagcaataacgacccagagaagttcctcaaggagaacgaccagtacgacactctcattgtcggaaagtactgcgagaaacgtgatcccaacttggcgtacattgcctacagcaagggccagaacgacctggagctcattagcatcaccaatgagaactccatgttccgtgcccaagctcgttacctcgttgagcgtgccgatcctgagatctgggcctttgtcctcagcgagaacaatgaaggccggcgttctcttgtagaccaggtcatcgccaccgcggtccccgagtctaccgaacccgagaaggtatctgtcgccgtcaagtcgttccttgatgcggacctgcctggcgagctgattgagctgctagaaaagatcattctggagccctctcctttcagtgataacaccagcttgcagaacctcttgatgttgactgctgccaaggctgacaagggtcgtctgatggactacattcacaagctcaacgagttctccgccgatgagattgctgagatgtgtaccagcgttggtctgtacgaggaagcctttgaaatctacaagaaggtcaataactacctggccgccgtcaacgtgcttgtggagaacattgtcagcatcgaccgagctcaagagttcgctgagcgtgtcgagctgtccgacgtttggagcaaggttgccaaggctcaacttgatggtcttcgtgtgactgactcaattgagtcctacatccgtgccgaggacccgtctaattaccacgaggtgattgagattgcaacccatgcaggcaaggacgaggatctcgtcaagttccttcgcatggcgcgcaagaccctgcgtgaaccggctattgatactgctcttgctttctgctttgcccgtttggaccagcttgctgagctcgaggacttccttcgcactaccaatgtagcggatattgaagcctccggtgacaaggcttatgctgaaggcttccaccatgctgctaagattttcttcaccaacatctctaactgggctaagttggcgactaccttggttcacctggaggactatcaagctgcagtggagtgtgcccgcaaggccaacagcgtcaaggtctggaagcaggtcaacgaggcctgtgtcgagaagaaggaattccgtcttgcccagatttgcggtctcaacctgattgttcacgccgaagagctgcagagccttgttcgccagtacgaacgcaatggatacttcgacgaactgatcgctgtcttggaggcaggtcttggtctcgagcgggcccacatgggtatgttcaccgagcttggcattgctttgtccaagtaccacccagaccgtgtcatggagcacctgaagctcttctggtctcgcatcaacatccccaagatgatccgggcctccgaggaagccaatctctggccggagctggtgttcttgtattgtcactacgatgagtgggacaacgccgctctcgccatgatggagcgtgcagccgatgcctgggaacaccactcgttcaaggacattgttgtcaaggttgccaacctggagatctactaccgcgcgctgaacttctaccttcaggagcagccccttctgctcactgacttgcttcaggttctgaccgctcgtatcgacgttaaccgtgttgttcgtatcttccagagctctgacaatattcctctgatcaagcctttcctgctcaatgttcagtcccagaacaagcgggctgtcaacgacgccattaacgagcttctaattgaagaggaggaccacaagctgctcaaggactctgttgaccagaatgacaactttgatgctgtggctctcgcccagcgcctggagaagcatgacctcattttcttccgccagattgcggccaacatttaccgcaacaacaagcgctgggagaagtcgatcgcgctctccaagcaggacaagctctacaaagatgctattgagaccgccgctatctctgctaaggccgatgttgtagaggatcttctccgctacgtaagtttgctatgtctgtcattgctcgagactttactaattttaactagttcgtcgatattgggagccgcgaatgctacgttggcatgctttatgcctgctacgacctcatccgccccgatgtcatcatggagatctcatggcgcaagggtcttcatgacttcacaatgcccttcatgatcaacttcctctgcgaacagacccgatcgatcgagatgctcaagaaggacaacgaggagcgcaagaaccgggagaagacaactcgaacagaggaggacaacactcccatcttgcagggctcgcggctcatgctgacacagggccctcaatcaaacggcgccggtctcacaccccaggcaactgggtatcgtggattctagaaccgtgcaccgtttttgcttttgattctccgtttctcttgcatttgtaacatacagcggatgtgatgctttgaggttgcaaaaggaacgatttcatatgggggatggttacgccaagagcgtgccataggaggaactcatgacagcccattaatcttgctttttgatttttttttcttcgccgcatgtatttgacaagcttccgtttttcccatgcttttaacagtctgggccatggcccgatattcagtaatagcattgcgatttcccacgttattttattctcaccgcagtaccgtcagttattccctttcccccacagtcccgagcctgccaagcgtctgcccaggcggatccattcgagcttcagggtcttcggtgaggaatgtagcatcgccaagacacgatggcaaatcatctgcaactatgttcccccatgggattgaaggtgagtcttcctgcagatcactcactgccttgtcagcttttagctttgcccatggggtgcggtggtagattagtattggacggttgtatgagatgctgtaccgtccccactcttcttacacgtcggctcgaacaagtaagcataatccactccgtacttttctttttttaggctttgagttacctacggaactactgaggtatacaatgtaaaacacagggtttcacagttccgacgagcccagcctgccgaattccccctcggcccggacagatggaaacgctcaattccaccggcggagacttggcacctaacgcggggaagaatcttacagccagcaagggttactggtggaaagaagggagtagatccctccgtcggggatgcgatatcatgcagaagtgtaaccagaacagaccagggttgatcctgatgaatccatgccaacggcttggacaaacttccaaggtgggggctggtggtagaggagtgcctcgggcggtgggtttccgtcgggattgcgagtccatgcagaagtgtgaaggggttgacgccaatggctcgggggaaattccaggttggatgctgatagataagcgctgccagcggtgattgcccagctctcatctctaaagcggaagcttatcagccaagagaagagaagagcaagggtgttgcaagtttctctgggcactgcaagaataaggtagaccaaggtagatcaggtttgcatttctcctggcttatggtgccaacaatggaagagctcggggtgttcagagcacccttgacacggtgggaataccaatggcgttggcatgtcgcgttcttgcgtaagatccaccagatagtcgtacctgtcatactccgtacaagcgggagatcccccgggagtgccaagtggaatggttatgagattgaattcgggatgaggtgaggaggggcgcttaatagtggagaggagccgtaccggtcgtaccgacacaaatcaaatatcgtcataggattcataggatcccctatcggcccgccaatcctttttaaaatcgttttagtggacgcatgaccggttggagatttccaatcttttcaatggaaccctggaaccttggaaccttggaaatgtctggacatgagtcagatcgacccctcctatctaaccttcatacatggaggtcggtggtgaaattatgtcgatatcgactcggccacttctcccctaggagacagagaggggaccctgtgtccatcgaattggcccgatccacttctcgctctgcacatgtgtttgtcgagagttctccgagtctcctccggccttttccctcgtctagttcccgcgaatatccgtacagttgggagttgaaggatcaagggcttcgtgttgttccctagatgctgacgttgatcccgatggcccgaggtagattggcggaataagttacctaaactacccgaagttatcgtgcgaggattatgagttatcgtgcgagaggaatcgtccggggtaagttgggaatgggaatgggaataataggaacattggttgtagctagggttagtatagttcctttatgggtatagatggtaagccccgcatagatttcgttatgcttttagcaaattacatttctcgaattggatatattcgattattgggttatcctattcttattatcctattattatcctattcgatttgatcattcccaatttctaggcattggtcccggtgtaccggtgaacctgtatgtacttgttacctcattcctggagtcaatcctcgcgtctcggcaagtacctgtgacttggtagatcacacttctgattcccctctttatctaacccccctcccacctcccaaccttcttgtcctctctttttcttcccccccttgtctttctatttcaccctttaaatactatcctatccaatttctatacagcttccattgcttatactgaagcacagtgcgagcgattgtgcagtgatctgccgaaaccggcctcaaattggacggagagctcccccagcttcttatagtgagtcaccgcctctgctttccataccggacctccggaggaagctctagagtcgaacctcacctaattcactcctttcaagtaaacaaacccttgtaaccgatctctcatctcgtcacatacattcacaatggctgccccgctccgccagacggataaggcggttgatgagtccgacatcctcgaggatcacaatgagcaccaccaggactcagtccaccgtcgtctgcgggccaactcgactattatgcacttcaaaaagattctggtcgccaaccgtggtgaaattcccatccgtatcttccgtaccgcacacgaactgtccctccagacggtcgcagtcttctcacacgaagatcgtctctcaatgcatcgccaaaaggccgatgaggcttacatgatcggccaccgaggccaatatacccccgtgggggcttatctggccggcgatgagatcatcaagatcgccctggagcacggcgtccagctgatccaccccggttacggtttcctttcagagaacgcagactttgcccggagcgtcgagaaagctggcattgtgttcgtcggccctaccgccgaaacgattgatgcccttggcgacaaggtttctgcccgcagcgccgctatcaagtgcaatgtccccgttgtcccgggaacccctggtcccgttgagcgctttgaagaggtcaagaccttcactgataaatttggcttccccatcatcattaaggctgcctttggtggtggtggtcgtggtatgcgtgttgttcgtgatcagtccgagctgagtgacgctttcgagcgtgctacctccgaggcccgcaccgccttcggtaacggtaccgtcttcgtcgagcgtttccttgaccagcctaagcacatcgaggttcagcttctcggtgataaccagggcaatgttgtccacctcttcgagcgtgattgctccgtccagcgtcgccaccagaaggtcgttgagattgctcctgccaaggaccttccgaccgatgttcgtgatagaatcttgtctgatgccgtgaaactggccaagtcagttcggtaccgcaacgctggtaccgctgagttccttgtctgtggcaatgagcactacttcatcgagatcaaccccagaattcaagtcgagcacactattaccgaggaaatcaccggtatcgatcttgtggccgcgcagatccagattgctgcgggtgcaacccttgaacaacttggacttacccaggaccgcatctctacccgtggtttcgccattcagtgccgtatcactactgaggaccccgccaagggcttctcccccgacaccggtaagatcgaggtttaccgctctgctggtggtaacggagtccgtttggacggtggtaacggcttcgctggtgccattattagccctcactacgactctatgctggtcaagtgcacttgccgtggctcaacctacgagattgtccgccgcaagatgctgcgtgctttggttgagttccgtatccgcggtgtcaagaccaacattcctttcctggcttcgctgctgagtcaccccacattcatcgatggtacttgctggactacgttcatcgatgacacccccgagctgtttaccctcgttggcagccagaaccgtgcccagaagctgctcgcttacttgggtgacgttgctgtcaacggtagcagcatcaagggccagatcggtgagcccaaattcaagggcgagatcatcaggcccgttctcacggatgctgcgggcaagcccattgacatctccaccccctgcactgagggctggaagcagatcttggacaaggaaggccctgcgggcttcgctcgcgccgtgcgcgctaacaagggctgcttgatcatggacaccacctggcgtgatgcccaccagtcgttgcttgccacccgtgtgcgaacaattgatatgctgaacatcgctgctgagaccagctacgcattgagcaacgcttactcgctcgagtgctggggtggagccaccttcgatgtggctatgcgcttcctctatgaagatccttgggacagacttcgcaagatgcgcaaggccgtccccaacatccccttccagatgttgctgcgtggcgccaacggtgttgcctactcttcccttcctgataacgctatctaccacttctgtaagcaggcgaagaagtatggtgtcgatatcttccgtgtcttcgatgccctgaacgatattgaccagctcgaggtcggtattaaggccgtccacgaagccggtggtgtcgttgaggccaccatgtgttacagtggtgacatgctgaaccccaagaagaagtacagcttgaagtactacctggatttggtggacaagatcgtcaagatgggtcctcacgttcttggaatcaaggatatggctggtgtgcttaagccccaggccgcccgtctgctgatcggttccatccgcgagcgctaccccgatctccccatccacgtccacacccacgactctgccggaaccggtgtcgcctccatgattgcctgtgccgaggccggtgctgatgccgtggatgccgctaccgacagtctgtctggtatgacctcgcagcccagcattggtgctcttcttgcttcgctgcagggtacccagtacgaccccaagttggatttgtcccacgtccgcgctctggacagctactgggctcagcttcgtctgctctactctcccttcgaggccggtctgaccggccctnnnnnnnnnnnnnnnnnnnnnnnnnnnnnnnnnnnnnnnnnnnnnnnnnnnnnnnnnnnnnnnnnnnnnnnnnnnnnnnnnnnnnnnnnnnnnnnnnnnnnnnnnnnnnnnnnnnnnnnnnnnnnnnnnnnnnnnnnnnnnnnnnnnnnnnnnnnnnnnnnnnnnnnnnnnnnnnnnnnnnnnnnnnnnnnnnnnnnnnnnnnnnnnnnnnnnnnnnnnnnnnnnnnccgctgaccccgaggtctatgagcacgagatccccggtggtcagttgaccaacctgatcttccaggccagccagttgggtctcggacagcagtgggctgagaccaagaaggcgtatgaggttgctaacgagttgctgggcgacatcgtcaaggttaccccctcctccaaggtctgtggtgacttcgcctcctggatcgtcagcaacaagctgtccgcccaggatgtgctcgaccgtgctgatcaactcgacttccctgaatcagtcttggagttcttcgaaggtctgatgggccagccttacggtggcttccccgagcccctgcgtaccaaggccttgcgcggccgtcgcaagctcgacaagcgccccggtctctacttggaacccatcgacctcatcaagatcaagaacgatatccgcgagaagtacggcgcggccaccgagtgcgatgtcgccagttacgccatgtaccccaaggtgtttgaggattaccgcaagttcgtggccaagtatggtgatctgtccgttctgccgacgcgctacttccttgccaagcccgagatcggcgaggagttccatgtcgagctggagcaaggtaaagtcctgatcctcaagttgctcgccattggtcctctctccgagcagactggtcagcgtgaggtcttctacgaggtcaacggtgaagtccgccaggtcagtgttgatgacaacaacgcctcgatcgagaacctcgcccgcgccaaggccgaccccacggatagcagccaggttggcgctcccatgagcggtgtcgtggttgagatccgcatcaccgatggccacgaggccaagaagggtgatcctattgcggtgctgagcgccatgaagatggtatgttgttatttcttttctattacatataatttgtggctaactcccctctaggaaatggtaatctccgccccgcacagcggaaaggtgtccaacctccaagtcaaggagggcgactccgttgatggccaggacctgatctgcaaaatcagcaaggcgtaaaagcatagcgactctgtactacgaaccatgcacaatttgtgatgcgtggtgtgatttgaatgttttctcagcgtctttagtttatgtttttcgagttcatatctgaatttaggtttattcggaatcaaacagtatttctgttcaaccatttgaaagttcttagtacattcacttgtaggtctattcccacgcttctccccattctcccgtctttctcccgagaacggctttgaaaaattcgtcaatttacggctcaggttgataactatacatttctttggtataaatcttcttgtttctctgtgctggatataataggcagcaggatagagcactcagagcactgttctagccacctgtacggtcataagtacttatctatctatctaggaaattaataccccggccatcgtgcgggtcaatttctccccactataagaacgtcggcacatccacatctataccccaactaccccaaatcaaccatcaacagaacataatcgaaatacaagatggaaaccatccgccgtacttatctcaaatccctcgctcatcgcggcataatccaaggcgtaacaatttcgacattgtcttctcccagccaagccaaagacctctgccactacttcggcggtgtccgctacggccttgcccccgccgagcgctggcgccgtgcccagcccctacccgcatctttcacctacggcagcggagaagcgccaggccaatgtgatgggggtgcagggctttgtcctcaaccaggttttttgaatatctcgcctgagaatccggatgcgtggaacgaggattgctttcagtgtaatgtttggacgcccattggagaggcgcctgaggggggatggcctgtttttgtttttattcgtgagtatcttctgatcagacataggatatatagtttcagacttggaatagggcaacaggcttctataaagatcgtgctgactggtgttgtccgacgcagatggcggatggcttcaattcggctcgcctaattcattcaatgtggctgcattgatcggcgaggccgacttcgactgtgtggttgtgatgcctgcgtaccgggtcaacttattcggattcctctactcagcagaattggaggaggatgcagctactgtcggagagacagttgggaaccacggattctgggatcagagattagcattagagtggacgaaggagaatatccagctcttcggcggcaatccggatctcatcacgatccacgatctcaggatattccgcaggcgccaactccgtcttccaccaactagcctatgacctccgccaaccagacgagaattctctcatccgccaagcctgcatctggtcaaacagcccagccgtccagccaaagcagccaaccgaaacacaaacccaattcaaccaactcctaacagccttggacatccccctcactctgccacatagcgagaaacttacccgcctacgctcaacccccgcaaaaaccctcctcgacaaagcaagaacaatccagctccaccaattccgcccaacaacagacacatccttcatctccccgtccctcttcacgaccctcgacaacggcgccttcgcccgcagcctcctagcccgcaacatccgcatcataataggtgaatgtcgcgacgagcgcttcctttacagcacatggttcccgccgacagacaacacgctctccgcgctgcgcacccgtctcgtggcagattaccccgaacacatcgtcgacgccgtcatcccgatatattacccggacggctgtctaccgacgaactgcaagaactgggaccaggacgcgtgggggaggatctacgctgatatgcaggtgcatcagatgcagcgtgggcttgtgtatgcgctgacggagaatgaggccggggttgatgcttcggcgttgctgtttcggtatcggattgagtggcgggcgaagtgtgtagagaagactttgccggttgagtggggggttacgcattcgtcggattatccgatttggttctttgggaatggtgggttgttggaggaggaggagaagagggttgtcagggaagggcttgttgggccgctagaaaggtttgcttgtggggagaaggaattcggatggggggtttctgggaccaagggcgttaggacgttgaggggggatgggagtgttaagattgtggaggatgcggattgggaggagggtgttagggtttggaagggtttgagagatgctgatgagaggttggtgtgatacctacaggtacatagttacatacgtagttatgaggtgcaagtatagacgccacggaggatataccggataccctaaatataggtagcttcgaccttgatatctttcaaactatatgccaagctttccccgcattccaactacgtcaaggctctccggggtacatcatagcttatcagtctattacaaagcacagtacatggcgtagtgaaatacctgtagtgcatggccatacccaatagtacaggtactggatataataagtaccagtcttgaccttggtaacggaactagaccagtccaaattcaatcagcagacggtgattcaccacctgtaacgtagtaagctgagtatgctcttataggccatcttcccccctctggccttggattatctcttcctactcagtttaattaattcaagctaatctgcgagaacattgaggtatgttccattttaattctcacctattctatatcccatctatccccaaagggcaacctgaacaagaatgacgtcgtcgattcccaacccttaagagacatcatgattagtatttccttggtttctttagaattccatgctctcactcttactatactaaattcccccagaagaactacaaaccattacggactataccagctgtctagacatctccaacatgtctgacgacacccgccgcaactggcacggaagccccggtgaccgtctcgagcactctaatgtctggatgagtggcggtgccaagagccctaccggtcgtgctgcgtgggcgatgcctataacgaacaataggagggtatgtcatttgcctcttgtggatttctattatatatcgtccattccccttagcactacatcatctatccatccataacacatctccaaaaccaacctaacatccaaaatgaaggactccgacacatccacatccacctcgaacggaaaaccagccgaaggagatacacctaaccccccaggcttaggtgagcgtcgccgcagctcggccggctccaacggcctcttctcgaatctgcacacacagaagcgtgaatctacaaacgcggacatggctatccgccgcgcgagctggaatgaacaggctgctaagggaggcatgttctcgaagtggtgggagggatacactcggggcacttgaagcaattgtttttgaacttggatcttttgcgtgggcatttgtatactcgatatcgggggttggttctggagatgagaaaaaaaaagaaaaaaagaggaatactggtattgggttttgatttagttcggtgcttgtaggcgtgtgaatttcatgatcactcttaattgtttctttgattttctttgatccaggctctccttgtgtctttctctacaaggagatactcgacgtacctgagactgctcctttaaatgtaaggtactgcatctgatccaacactgtcttttctacctctaatccatgaccggcacttgaaataaaacgactgctattgctaattcgagacatacatttacaagcctaacataacatccagcagagtatgacagagtcctcataaatggaaccaacaactactctggctgcaaatatgaacacggatttcacatcattggactgggagctccaaagcccaatttggcaatacctcatcccatggttgtctcccaacctttctcaatcataacatcaacccaataagtatcatcgtccccagcatccaacctcctccatacttcattaaccaacttcaagcatatatgaatcggttttggcggcagaacgtgcaagaaggacgttaaacggccaaggatgaacttgcgcgtgcgcgagacttcaatggcctccattgagatggtaggtgtctgattcgggttgtaactatctttatccctgccctctggataatcttcgccattccgggcttgagtgccagcatttgtggccagacgcgggagacggagctctgagcaggacgccactaggagaaatggctggaggcagcgggtacgtgattccaggggtatggtttttaatcgagagagggttgtcacggcgaactcggtgagccagttgctatataggatttcgggggtcggagattgttgggtatctggtgatgacggagatggtagattgtgagaggaagatcttcgagacggcgaagcagcggtacgttgagacttggtgttttgtcctgttgctggactaggacccccgaatctagctgacaggtccatgctgtcgaggtcaatggggaagaatgggtcgcgggatgctgcatcggcgttgtcagggtattgggatgttgtggatattggggtgggcaggcgtttgtgcagtaggtctgggaatacgcggtataactgcatgagaccgacgcatcgatatgcttcggccattgtcaggaggtgccatactggggtatcgtcgtcaccaggactgacaatctcggcctccgagggatgagcgaggcctaggaggcgttcttctagctcgcgggctttctcgattgccaactgggcacgggtgatatcatcttgggaggtgaatcgccttgagcggatgcgttttcgctcacggcggatgagttgcccgacctcgtgcacggtgaactgggtgtcgcgcgcgatgccggtccatgggtgcgggacccgttgtagaacgaaggactcgccaatagacgaagcggtccgtgaattgttagataggaccatcgtgtcattgtctgcgacgaaggaaagcagcatctcccagtagatgagagcttcctcgaagaaccggtaattattgctgtcgttcttaggtaagctgaagctagagccgttcgatggtgaagagatggtattgagctgcttgcggagcaggttgaaaaatgatatacccaagtcatttgggtcgtgccaactagccgtttgtccgagcattagcagcgccagcaaagacttgtcgtctatcactgcttcgcgcgtgattatatcaacagcttcatcacgcatccttcggcccatgggaccgaactgaggaaattcggtgaccagtgttgcagcagccatgctttgcattgttcgacacattgccagtgaagatccccaaagacgggataccgtggttcggaaggggttcatctggctgtcgtaactagagaacagtcctgccacttctttgaaatagtactcgatcaaagtccatgatggattattcagtggacgagatatggacatgaagttatgtgatgaggggcggtgcgatgcaggaggataactgcgcacaatggtcgaaggtgagaagtcgcggtaaacatcattctgttcctcactttgcgttggtccaatacgcgacagaaagtgtgacaggtctacaccgatattttctgacacttcaaagtcacggaaagtgtctctttggtgtgtgaaagacggcgatgccggcatcggggacggtgagcatagatccgtcagttcgggtaaagacccatggctcggatgttcccatagattgtcacatagagaagttcggctatctaagacgaaatttggaggatccggttcatgcgtctcaaatgttgaatcctccggcaaagcatcgtcgatttgggttaccggctggctaggaccaggcgaggcagaagccgcaggacttggtgttctcacctccgagatcgatgcgggtacggtgggactagactgctcatacttggtaacccagcgcagggattgtgcataaccaggacaccggacgcccaagcgagtgcagcgagtgcagtgaggtttctcttcgccgcatttgacctttgcatgttagtgatatccgaacgggcggggacgggaaacacaaacccgtttactcttgcatcttgcacagccatttctagatttcttaacgcggcgcattataaagcataaagaggatgaatctgaggagatccggcaacattcaagatgcggagtataggctgagggggaaaatcgttgagaatcggggcttatctcgataaacgggattcttttgcccctttgggcaggtgaaacaagagaaatgacgatgtctgatttgatgactgtataccatatggaagactacgcgaggcatctacatagtacaagtgtacggagtagtaaaatcataaaacaaacgtctatactctttactattgttttgaccttccaaggggtgggaaaattcatgatgactcagccacggcgtttgaggtcggaggcttggtgcttggcaattgatatctacacctggacaagactcgatcatggcatatatagtgcgcagcaaggtaagtataagtccaaatgagcattcaagaagtctaacattaacataggtaaccacagtaccttttcaaagacttgcgactttcaaaccagtggtgatcctggctaacggcctgatatcaaccccgagtctccatacaaatcccactggaaggcctcaattgcagagtaattcctgcagaagtaactatgctcgcgaatttcactcaactcccatcacaatgtcaagcaactccgaactcaagcagactttgataccaagcctccttgatgacgtgcacaagttgtggttcaatcacctgagctgcgaagaggccctcatcctacccggatggagcgagatggggaagtggttctctcgtgacgaggcttttgataaggcctgcgtgtaagtgaccatttgccctacttgaaccccatagaagattaacgagctcaaacagcacccaattctgccctgccctagaaacaatcgttggctccagagcatcagcttcggacattctatctgaagtcagcctgtcctcgccgatggattggctcagcatcattcttctacttgatcagattccccgcaattgctaccggggagcagagtcgaagctagtgtttgggcgctttgacccattagccgaggagattgtccttcgagcaattgaggaagaggtaccgatccgatcgccgtatctcaggtaccacatggcttaccgtatttggttccatatgccccttatgcattcggaaaacttggctatgcatgagctagccgtcaaggtgcacgaggatatagccagagatgtcaataagcttctggccagggacgcatcggctcttacggaagaggaaagaaaatgtcgtagcattctatccgagaagagagaggcactacaggcattcttgagcaatgctcttgattttgagaagagacataaagtgatcatcgagcggtttggacgatacccgcatcggaatcaggcactgggaagagtgtctaccccggaggaaatcgaatacttaaacaatggcggggagacatttgcgtgaagccaaaccgagtttgtatatattcacgaatacgcacataatagtaatatgatacagtattgagctacgggggagccagtctccgcagacaaaagcgtcgaattattatttcgcaatagaaattggccaccctacattccaatgaacgatttggaattccgtcccaaagcagtaaatgagcacctgccctttcaccctttcaccccttggtagctcgcctgacccctttcctattcgagcagaggccacatacctttcttattcgggtgttgttgaagtgtacataaacaaacaattgaacatcaagccggtttcagatagtgaaacaatgaccagaataccgcatctgttacagagatgaagttgctctttctcatctggatcagtaacaggccttgctaacactaaacgcacaattcaaaatcatagttcgaccatcattactataagtgctgtctgatagaactgaacgtggattcaagaaaggtgaactggaggcaacaatgggaattttggtcttcccagctctatctcattcatcatgattataccacgccaatcttctatcaggcccttcattgtctcgctgctggttgtctcagtgatatcctctaaagtgcttcatcttctccaacatgcgttttctcttcccggcggtcaattcgcaatctacttcccgacattcttcatccttgagacacttttatgcgtggctgcgtgggagttgctattcaaatttacggggttgaagtcacttttgggcactgcagtgacagtggccataacgtaagtacttctctgcttctaggtagaattcaatgagactgatatactgactgctacagggctctgagcttcgtcttgtcttcatctcaaattgggttctatcttgtaactggcagtgagatccgttgggatgcagccacagccgttggaactgatccagaagggagaaagctgatgctgagcgggctgagatcctttttgggagccgcatgcgcccttcttgtgatttcatggctactcaaatattggatatatgttctcataggccattggatgtctgcactatttagcgcacaaactgaaaaggcagacgaagaaggcatcgtgaccagccctcaaagaaagtcgcggacagcacgactcattcaattttggacagtatgcgccgcggtattcattggattcttgcgcttggctcggccccaggtgccttataaccatatgtctgagactatcccattcagctttttctgggctttgggttcgaggcctgctgagctgcatcagactggagatcaatcatttccgctcgcagacctgattgatgagccatactgggaaggtccatacgatcacttcaagggttgggccccaggaaagccagactccaacgcgaaaaagagtcgacccgtatgggcgtctggggatttaccaccagggttcgaccggtggagtgaagcagagtccggcgatgaaggagggggcgttactcttaatgagaacggggcttctcagaagaatatttatcgtcccacggatgaccctctccgaatcaccaacctcaatcgtgaaatgcttgagcccatagctcaggttctcaagaaacatcaagttcccattacacatgtcgtacttgtgttgatggaaagtgctcggaaggacatatttcccttcaaggcaggctcacatctgcacgagatgattctatcgtcctgtaatacccaagaccccgaagtactccaagaggtcaacgacaaattatcaactttgacaccaaacgcagagaagttgaccggtgagacgagtggactttcgacaagtaacaacatttccagcccctctagtggatggaatggtacgacggaaccaggaatgggcggtatcaatgttaacggtgtcctcactggtagcagtctatcgttcaaaagtgcagtcatgaactactgcggcgcgggccctctgccggtgaacttcatggaggaggtcaacgccaaaaactaccagccgtgcattatgcagatttttgaattgttcaaccaacttaaaaagaactcgactgagaagggcaagcctcgaaatgggtttgagcacattcatgatcgaaactggagcactgttttcttgcagtcgatcacaggactgtatgacgagcaagatgagctcaacaagcagatggggttccaaaaatacatctatcgcgaagatattggccagcaaagtgccaaatattatcacgaagacatggaggagatcaattactttgggtaagtattctcccaccgactgagcatctacattcacattgctaatacgttacctagatacccggagtacgagatatacccatacctgcgagatgtggtgaacaatacaatcgagaacaacgaacgactttttctatctcatttcacgagcacaacccatcacccatggggcacgcccacagcataccacgaagaggaatactttgccggagacagtctcatggcgaagcacgaggacatcaacaaatatctgaatacggtccgatacgtggacacatggcttggcgatatgatgaaggtcctcgacgaagccgggattgcaaacgagacattagtggtattcgtgggagatcagtatgttgcgccagcttcagtaacttcgcacaacaaccaaatagccatgtactaatcccaaacagtggccaggcgttccccgaagatgcgccagtctctggtacatatgagaacggacatatcagcaatttccgaattccactcgttttccgacacccgctgttgcccgcattgcaaatcactgcgaatgcaacctcgatgtccgtcgtcccgaccattatcgacctactcgtgcactcgggctcgttgaacgagatggattccaatgcggctttagacctgataaatgaatacgaaggacagtcattgatacgcccataccaagctactcacaatggccgacaggcatggaacttcggcattatcaaccccggtggtacaatgctcagtgttgggtctgcggcagtcccgtatcgactcatattgccgcttgctgaggactttgagtacattttctctgatctagataccgacccggatgagttaagtccattgcgtgggtggtcccttggggagttgatcggccgtgtacaaaggaagcatggagacaaagccgggaagtggctggtagacgcggagaaagtggggaaatggtggattgaggagcagaaaagactgtggaattaccaataataatgcaaataaatctgccattcaagaccctaggagaacagagaagaataggaggagaagcgggttgccttgatattgttcggtttctttgtttgcgcctgaggcagacacatccgccccacctccacttcatgttttatattcgttgcatttcgcgttcggtcttttatttggactattatcttttcaacagcttgattgatcgagattgcacccttagctctcggcagcgcagagccttaagtctggagacctaacccggactcatcctgtgcatctggcccctgtacccccactatttgattgcatcccaacaattattcttccactcagaaagtttctcactgcaatctccaacaaatcatggagggaaaatattcgaccgatcccgagtgggcatctgtcaccccaattgacctggacgatggttcgagctcgggtgccatgccactggcgaccatcgcctacccaaccgagtacctcgaggcgacctcgtatttgcgtgctgtgatggccgcgaacgagaagtctgagcgggcattgaacttgactaaagatgtgatttcgatgaatccagcgcattacaccgtatggtaagttggctagtaacagccttgggacatgccaatatcgacgtctgacattctatacaggatctaccgagcaaagattctctttgctttggaaaaggatctagatgaagaattgagctggttgaacgatgtttcattgaagtacctcaaaaattatcaaatttggtatgtcgacaccaccaacaacagaggagccgaaagaaaaagccaggaaaatataaataccaaaaacaaacctaacatctcaaacaggcaccaccgccaagttctgctatcatcaaaagcacactttccaaccttcccacccaaagaagcagacttcctaatggagatgttcgcccaagactctaaaaactaccacgtatggacctaccgtcactggctcgtgcggcacttcggactatgggaccaaccgcgcgaactcgaagacgtggaattcctcttgaaagctgacgtgcgcaacaactccgcctggaaccaccggtacatgctccgtttcggaccacgggacacatcggtcccagacgcggggatggtgaacgcgggtgatctttcgactgcgccggccgataagggcaggctgtctgttgtcgatgaggacttggttgatggcgagctgaagtttgcgcaggaggctatcctgcgcgccccggagaaccggagtccgtggtggtatgcgcgcggtgtgctgcgggctgctgggcgtggattaggggagtgggaggggtttgctggtggatttgtttcggagggggccgttaagagttcgcatgctgttgagtggctggcggatgtttttgctgaggctgggggggaggaaaaggctgtgaggatgttgacgatgttgaaagaagagtttgatcctattcggaagaattattgggactatcgcattaggaagctggatcaggctgtggcttgatttgaagaaagacactacgccttgtgctgaacaacttttgtcggataatttatatctgtttatgtacctttcattgaaaaatcgtacgtctaaagctgattctgcttcgaattaaaagactgctggatacactgtatgattacatgaacgatgcgaaagtctagacctttatctagacggtaattaaaatgtccaagtgtagtgctgcaaatcaaacgccaaaaaacaagtcaaaaaaagtatcgaaaaatgaaatatatccatcatcgaaattcaagcccatccctcatccaacatcctgcgccattcactagccatatcgatagtgacgttgctaccgccgcagacaatgatgacaattctactctgcgagttgagatcaggaacaagttgcttaagcttcgaattcagtttctcgccgacttctggctcaacctcctggtctgtctcattgtccgtcgaggtcgaccggtcatccccatagccctcatcgcggtaagtaatatcagtctcatccaagcccctcttccacttcgatgtaggaacagcagtagcagcatcgccgatggccgcttcgatacagacaccgcacgcaagctcgacgaggagtcgttcatcgttggcgaggcggagcacgccgcgggcggcgtctgcatctgagagcacggcgctgtgcaccttgatgcctgggggcggggacacggcgtactggaaagttgtttccgagacgcggacagcaccgagagaagtggcctgggatgtgatccttgggagggagatgagggatttattggcgatggctgctgccagtgaatcggtaccggccgtttcaatggcgaggagatgaatggggtttggtgtgggtgaggaatatgaggtaatttgcttcttctgtcgtcgcttttcgatgcccatgacgagtccattgagaaggccgccaccgccgacgctgcagaggatggcgtctaaagggagggcccggtcattgtaggcttttttgtcttcgggggtggtggcgggaggaagctgggtctcgagctcgtcgatgatggtgccgtttccttcccagataggctggttgtcgaaggggtggagggcgattttgatcacatcctggtcattcccgctgcttgtcttcatgatagtttcccgcatgtattctcctgcttctgaaaatgtctcgccatgccggatgacgtctgctgcacctgccgcccggatcttgtcaagcatcaagggatttgtgcccatgggaaccacgacagtgcatgggtagcccaggctccgggctgcacagacggctgccagtccggcgtttcctccggacgaggcgtagaaatggactctgcggcccacgttctctgggttgcgaaggtgagaaaggatttggttgcccatagcacgggacttgaaggagccacttggctgcacgttctctaactttaagaagatcctacaaccagctgctcgagaaaggcatgcagactcgaccagtggtgtctcaatccatggcgtcttgaactgcagctgaccataggcggaaatgtcgatgctccccattttgatgtgttgaacaaatggaaaaagaaaaaaaaaggttaccggagcaattccaagaccagaagtatagagatgatgttccccaaatagtatattgttgagtcgagtggttacacgacggtaggttgtaaattcacgaaaatagagatagggagatatcgggaagaaaagaagagcgataaatactgaaacttccaaactccaatatgcagatatgaagatatgaagacatgttttgatatacaagtgagcctcaagggccagtacaaaagctttccgacgggaaactagagtttcccgtctgataggactgatcggagtatccggttctggcccagcctttcccgtcgatagccatgtgggtcgttcatgacgaccatgacataccgtctgtttagaatggccgggcgtgggaaacctggcgtctcagctttcgaggtgtggaggagggggggaaaacctcatctggtctgccgcatccgagcggagaagatgtatatctttattcagacgggcgtctcggccgcccatgattggccgccgatcgattcctcttatcaaatcgaaagctcaaaaacaggcggattactcctcagtgagcaaaggagggaaaataatgcctttcttaacgccctcgccgtaatctgaatccgaaccgtacgccgtggccgcgaatgcccgcttggaggggtccgaggtgtttacacggagcaattctagaaggtcatgagacttgccgggcatgaacggttgcaataaaatgccagcgatccgcagcgattccgccacgttgtagatgatccgttgagggttgggagttttccacggttccgacgcatggaagtacttgttagtctacaagcaggtcaatactcgccgaatccatgcggggatgatcacctcttaccttctcaataatgctcataatttcgtgcagcgcggcacgtgggtttagattctccataagctcggcaacctggggaggcgtctgggccaacatttcctgatgttccaagtcctcaggggtagcagctggaagtttacccgatcgggcgtccataatgtacgagcgcaaattgccacgcgcacatccgattgtacgcagagcaaggtttccgagtcccccctgaagcaatttcttgtaatctcggatgatgaaggaattgtcaaagtccgcatcatcggcgaggccaccccggtacgctaggaagaatcgcatgccatcgactccaaaccgttcaatggcgaaaaatgggttgacaacattgcctgtggacttggacattttttcacgattcatcgtccagtgtccgtgcaccaagacgttccgaggcagaggaagatcaagtgccatgaggaaagcaggccaataaacacaatggaacctgccaatcgattaactctgcacccggttctccagctgaactcatgaactcaccgaacaatatctttgccaactacatgcaagtctgcaggccatacggatgtgttgtcttttccaggtgggaaaggatatccagctttggtcaagtagttgaccagcgcatctagccacacgtagattgtctgcgtgtcatcgccgggaacacggatgccccaagtcagacgttccacgggccgagaaatcgagagatcctgcagtcccgactcaactccgttgatcacagcagctgtataggaggtaggggtgataaacggatcttctcttttgtacaagtcaagtagacgatccttgaaggctgagagacggaagtggtagttggtttctgaggaccactctacctctttacccgtttctattgagacctgtgtggtgttagtattctttctctttgaaaaactgataaattacataccatgcgcttcctccctgttgatggatccagggagttctgcacttgcgtctgtgggtagaatgtctcatcgctgaccgagtaccaaccttcatgcttcgaggtgtagatatagccccgatgttgcagcatttcctactaattatcagcgtgccctactatgaacggagcatagtaacttacccagaaatattggacggcatctcgatgcgccgggtcggtggtcctgatgaaatgatcgttgtcgatgtttgcagccttcgctagggcctatatcacaaattgagttggagatactcttgaatatagcaaaggggactcgtacctcaaaggtccggcagttcatatcgcaaaatgcctgggtatccatgcccgcttgaatggcagcttgttggatctgcgatgaatgtcaacgcccattatcgaactgcaatcccatctgtatgtaataccttcattccatgctcatcggttccggtcaatagttgagcatccgtgttcccgagtaagacctgccaccgtttcatgatatcggcgatcaccattgtgtataaatggccgacgtgaggggctgtaaggaaaacatattgttagaaaatcagtttatacatggtattcactacggtgctcaccggcgttcacgtagaaaattggcgttgttacgtagtaaggcttggacctttgcggcgtagttgcaactccgcgccggggggttgttgcccatccatgcttgcaagatatacagttccacggatttcttgatctcagaagctgagacgctctgaataacgagcgaagtgacgtccttgctgcagccattgggatattgataacggcaagaagagcatgacatgttattccgcacatctcgggtggtccaagcttctccgcaagtcacggccttttttttgcgcctacatcatcgcgcttacatcgtcatcgagaacacccacgaccttatcgtcgataagtatatattattcatttctctcatttaaaacattgtttgaagcatacctctacatcttcttgtatcacgcacaattattcccgggttttctttggcgtgaaataccgatcgcgatggctacagcaagcgaggatacactgaccaaagtgtcgaccgagggtaagtctcaaattataagttaatttcatgccttgaactgacatttgcttgcttttgtgttcagctgcaaccgagttcattaagaccttctatccggctttgggatcaaaccgtgaatctctcagctcctactactccctcgagcctacaaccatcctgttcaatgggaatcgtgtcgcagatggcgctgctgtgcaggaaatctttaccaatcaaatgtcgccaacgtactacgaagtccaatcatacgactgccagatcatcaacaaagcataccccaccattttaccgggtggtggactgaagccacagtccgagatgggagtcaaagacatgtcatttctcattgtagtcagtggatttgtccgctatggcgagggtcgcgatcagccgcaacgcggattcagtgagacatttgtgctggtccccaatccatccgcagagagggcgaggggccgcaaggattggctcatcgaaagccagaacttccgccttgtggtttgaacaattattccaacgaatcatgaatcagcttcaagtcaagagactatgcatgtgatacagaagtgaaagacaactgagtcatacccacccaccaaagatgaattgctgagagatacacgatgcaaccaacgatccactgcttgagatttgcttcaaaactagagcgccagacgccagaagggaaggaaaatgatgatattacccctattatcagggggattatggcttagccgatgtcttgcgcggtatgcggaggtttgctttgactctttcaagcagctcctcacgcgtcgcagcctcactcggtagaagccctctctgagataatcggtcagtgtacgattcacaagaatgtatgattatctgaacacagtcatgtccgaacaaatcactcaaacataccgctttaagccatcttcgcatctcatccattgtccagttttcagggtctagcttccattagcccatgttagatacctaataataattactcttaccaccggtgggatctgcttgtgcgggaaggacatcgctgcccaagatagtataggctgccactgcagtgaccattcctgcgaatcctacataggaagatagtggtcagaaaatgttgccaagtgccttgacttgagatcgtctaccgaggaatagattctatcgagtccagtattagatatctatcataaaagtatagacagacgtagtaccttagaatgcaatgctcggtccaaaggggtcggcatcttgaaaatgatgcggtgattatttgaggttcttgggttgatgcagaagtattgtttcttaatcgtcaaaagagaagaaataaagaagaaaagtatcacagggcacgtgcaaaagacaagtattcaagacgaatagatgtgaacagctcgtcaagacgtgggttgcaccgccacactaacgccaccactgctgccttggaactatacagttgcacctacttcaactacatatcttcgataactcccaagttcagttggtggcactttccatgaactaattaaatacgtaaatatagacttatgggtattgctcaggtagaaaatgaaatgtgagcctaacaactatcatcagcatcgcatatctatacccaccagtccagcatggttaccatcattcattttgaaaccccttgaacagtcgaattaataaacgacatggaagcagtcattttcctgtcttcggttacattcgttattgcggtgggagctgccatcaaacaagggtataattgatcaccattgcagtatcgagtcagacattgattccatttacagcatagccctttacagacgataccgagtccacctacatgtcacatcaaaaggcatgactcctccgcagagtgtggacctggagagattcgatactcaaggaagcacacccgttcagccgccgccgaaactgcatcaccattcacgattggagagcagaaattcaagatggccaggatatactgaccgacgaagtcaaccatcgcgaacaatggtggaccattttgcgtcatatcgcattcctgaggaagcagagacagggactgttcatcattacccgtattcgcattcgctgccccccaatcttccagccacatttatggccccagttgcacgagccacaacaccaccaccagccacttcagttaccccgcctgaggcaccaactgtagctcatggctgactaagcaagggcttttgcagcttaaagccctaatgtgatccgcacacattcaccttagaggctagtgtcgacagtgagctttctcttttgcaccttgcttcaaaacacccgcaaccgtcattatgcctgccgaagtctccgatatcaagcagttcattgagatctgccgccggaaggatgcctcctgtacgttacgctgcatcgatagacctccgagatgaggcctggggatgatcatcggtgctgactgtttacgcctctagccgcccgcatcaagaagaacggcaagaaccagcaaaccaagttcaaggtccgctgccaccgcaacctttacacccttgtcttgaaggactccgaaaaggccgacaagctcaagcagagtctgccccctggtacgtttcaatcgcattgttcctccgtctgagttattgaggtatcagaggatatacacttggaagacggctcttggatatagctctgaacctatgctgacgattttcctctgaacagccctcaaggtcgtcgatgtctccaagggcaccaagaagaccaactaaattcggtaaccatggaatgaacggagaatcggagtgcggcgtgattggttgttgatgcatgcaagaccaactgttggggggatacatgacacggccgtggtccctctgcgagccgacacggggaaaattccgtggcgtggaacatgaatcttacgtcgcaggagtttctttgcgcctttgaaaccggctgctgttattcaccggccaggcgactcgtattttctggacgcactcgaggaacacttttgtcggaggttctagtccctacaacccaatgaaaaaaaaacagttgaaatatcattactacatgggtttctcgttctcaatcgagatttcctaatccattattctcgtcatggatattctctcatctcggatcttgtctcccaaggcaacaagtagaccgtatggaatagatcggctgtccttgaaatttccagttattgactctacttcagtcgtgatctcgagttaaacaatctcagattgacattgtgaccacaattctttctttgctttgatggctcgactgagagcaatgacaatgcctatttttagggtgttgatactccgcacagccattggatctaaccatcgcgcctgcctgaattcagtacggcctaagaacactgccaaagtatctgccacaatggagtctgctactatagattctaccaggttcctataggatttaagtacttggaaatggggcagttgataaagcaggtaatgaggcagtttacgatgaagcaagatatgataggagagacttatttttgttcggggtttacatacaaattgtaggtacccgttgctgtctaccgcagaagcaggtgggcacctagcctaattaggaaggcggtactgaagtcgggatcaataccctatttttatccggcgttgggttctttgatatcggcctttctgggtctttgttcgagtctaattcatacctttgctagcacaataccgttgttgaggatcattatctctcagaacaggcgtctcgaaaggcctttgtggatttttttcttctaaaagtcaaagcaaggatggatgcccgaagcatgcctcggatctatataaatcatctcgagctcgtcaaaaatgaagctatcaacagcattagcatcgcatttttccgtgcctatatatcatatcttctccagaatcttattcgagttttaacacggctggcctcattcagacaacccagcgaaggtggaatcgaaaatatgtgccacaaaaagccactgatccctgctatgggaaaccttagcatgttcccagcagagattatcttcaatattctagatgaacttttggcgagctctcccagattgacacacgaaaacttccatgccattaaccagctgacgaaaacaaataggacactagaacaatacatcaaactcggatggatgggtagcaatgcgtcgaacagtttcaagcaaggcgtgaatactgtccagtggtactcaaacagcgataatgcaaataaggctttaaccctccagggcgtagaccctcaacgcatcatgcccatcgaaggtccccgcggccttggtcccgatctcatcaccggtatcattttggctgactgcacagattgttttgagtggttctccgaggttctgcctgctacccatatgagctgttgcaacgagggcggctggtcatttctttctctggcactgtacgctagagccgagaagctacttgatcttttcttcctctcgggctttcctttcgaaccgagggattttattatcggcagtgctaatgctatggggaaaggtccgtcaatccttgggcttgctgcctcatctagagatcatcagtctttctctaggctctttaggaaactgaaggaagtcttgaacgggcacggcttccagaggactcttagagatagactcacgggtaaggagcgagcggctattcgaagtgttgctcctcagtatttacagaagatgttgtatgaagctggcctggtcactatgcacccggctcttcgttatagtccatactactccggtaagcgcaccctgatgtactaatcttctcgttatatagggttgtatctccttcattacgcttaggacaacgttactgacattcgcataacatttctctacctatctctcagtgaatatttgttactgtcattgatcttgtcttattttgttaagtcaactactgatactgtcttggcattataccactttttacatttacattttcgggtgttaacatatccagcgtataataatcaatcagaactttagctcgagtatacctcattattgtgcattaccagatatatggaataagtagatatcagcccttttttctatctttagctaactagtacctaggtatttctgtagatcattactcttcaagccacggcactcagcacttcattcctatacatgttgcccttcgcgttgcttggcatgtcgcagaattccttggcatcaatcgggtcatacggtgagtagactgagagtcttaggaatattaggtactccgtacggagtactccgtggcagattctatatttccgtcggctcgcataccgaggctttccattcagaccaataaaataaaaaggctgagctcgatctatgattttccaccaacaggttcccataacaacacttcttagctcacaccaacccgtgccaattgacgtaattgtgcttgatactattccatgatcagaacggacctcctccaggaacatacgcccggctagattaatagatgaccagactaggacgatatctgagagggctatgtatataaaatatagctgttgaggtcaaatatatatatcatacacatacagaaatatccattcatttatttcccagaaagccagagcaaaatgacactttcaaagctatctacgctcctagcctctgcctctcttgttgcaggccacggctatgtctctagcatcgtagctgatggcaagaagtaagtcaatctaagaaacaaagtctccataccaataacaactaaccacattatcagctacactggctacatcgttgacaaatacccctacatggcagacccccctgacagtgtcggctgggcaacaacggcaaccgacctcggttttgaagacggcaccgaataccaagatccgaatataatctgccaccgaaacggagtcaacgcagctttgagcgccaccgtcaccgctggctccagtatcgatctccaatggacgacctggccagactcacatcacggtcctctgataacttacctcgcctcatgcaacggtgactgcagcacagtcgacaagacgacactaaagttcttcaagattgaagaagatggtctcatcgatggtgcaactcctcctggtacatgggctaccgatgatcttattgctgctggaggccagtggactgtgaagatcccccccactcttgctgcgggtaactatgtgatgcgccatgagattatcgctctgcactctgctggccagttgaatggcgctcagaactacccacagtgcttcaatttggaaatcactggcggtggaagtgatgtgccggatggcacgtttggtggggagttgtatatcaatactgatcctgggatcctgttcgatatttattctacgcttacttcgtatattatcccgggaccggctttgtatgcctgactcagggttataattaaacatcaggtggagggtgtttggagggatgtgagtttggatgctcattctatctagtgttattcaaatatcacgaaatgaatgaatgctatgtgataacacaactccaaaccaaccagagtccctataaaacattgataattcgaatctattctgttctctcataaggcaaagcgataaaccctcgcacattcgccccctcaagcgccgcatcaataccacttagactcaaatccatcttgcgcaactcaaactccccaaagaaattcggctcagcagaaaccctctcaaagccaagtccctcaaacaaagccaaacttctcaaattcgtctgtccaatcttgacattgagatactcaaacgataaccccttcgatgaccccagtgtcttaacaccagtccctaacttccgcacagtctcaacatcaacatcaccaccaccaacaaactcatccagaatagcaccctggttctgaataatataccgcataaacatgagtaatgcagcgcgcccaaacccgcatcgctggttgactttctcagcgatcatgagctcgagctcgccgattatccgcggcgggctgttgccctcctcgccgtcgtcgatgcgcagaaataggttgatatcgccgaccatagtagccggcgaatcactttcagtttgtagctctgtctggctaggggcatcgtcttcaatgcctgttgtgattgcccgacagacgataaaggttagcttgtcggcgtcttggcgccagctgcgttgcatcgagtattcttcttccagagttaggggctccgaggctgttgcttcttggatttccttggggtctgtgagaaaggtggccgatcatagctaggatcttattgatcttgtttgcttaccgggtctttcatccattcgtggtattggggtacatgccatgatgagtacgggactaaaagagcctttgaggagcagagggctattccgcggaagtcagaattagcttcttctgtttgtattatagtctcaatctgcaaatcttcggggaaagtatatatccaggtatgggcatagagcagcgtaccgatgttggcattgagcagcattgtggtggatgatgagaatataattctttgagtatggataattcagaatgactcaatatgtatgcactcttgcggaaaaactcgttgtctatcaatatctcgatggatataaagcggaggaagttagtgggatggatttctttccaaatgtgggtcttggcgcgtagagcccacccggggtgtatacgacaggcttatataaatgtatcagacgtgtagggtttgagaatgtaattatttcattagtaccattgattggtagctctatcagtttatttttgttcttcctgaccgttgaaaactccaaaccggaccacctcgacctctagcgtttcggtatcaaccagaattaactccccagtttcgctgaatttgggaagtgccaacagccgaacacgggctgtatcagaggaatcagcggcacccgtcatttcagtgtcgccatctaggcggggagggacgccaccttcaatcgtggtagtcttgaactgtggttgattgccagcgaaaaaaatatgaggacaggactcgatgacatatggctcctcggattggtatggatatgaccctaaagggtattgttagcataaatttctctgaaagattcaagtgtccaagcatacaaattgtgtccggcgcagtgggaacaccgcagcgccaacgaagcatagcttccatgattcgcatccgagcattcgaatctgtctccttttctgggctgctatcatcaccctcaatagggatataccgcagaacatcgtcaacattctgaccgctgcatccccatactcgccagccttccacgtcgccgtcccatgggttcgtgacactgtcgaaccagctcacctcaggcttttcatcccctctgacaggaggtgcggaatattctcttgcctgagggaacatagtacgatggatcccctgttgagggagagagaagttcgcaggatctttttcgcccggcatgagtgtgataggaatgctgggcaaaatctccgctagaaagttatcgagttctgtgataggcgcggcattgtatgcagagcagtcatagccatactttcttggctgggcttcctctgcctcagcatcgccgaagcttgtcaccgccacatcttcaattatgttggctccaattgaattacctgcgatgatcaagcgggagattttagatgagcccaaggaaggactgttttcggcgttccccgagaatcccgtgtagcccagaagataatccgtcaatagctccaaagcaagcgtgtcgcttgatgttcctgtgatttccaggccactaacgaaggcgattttgccgtgttcctttccagcaagtggagcattgcccccccatcgttgaagctgcggagccaaatccggaagcttgatatcaataacctcgaaatctccatccgcattttcagtgcccaaagccgcgataattgcacctgtcgccagctgtgtagactgcaggaattttccggtgagccgtaagcggccagactcatcttccatcataatttgggtcaaagaggggtctgaagggtcggtgtaggtgaggcggggagggggcgcagaagtgaagttctatgggttgtcagtggaagaagcagcagcaaggttagaaaacgaacctcttggttgagatcatccaaaatattcggcttcattggcaaatgcatatatacggtgccggccacccaacacagctcgccttgtcggacatcgaggactcggtcgacacgtcgcaccttctctccagcgatctaattcacaagcaggtgttaggaaattccatagccgagagcgcaaaatatttcctaagactgagtgctcttacaatgaggccatcccacgcatccgtcgcgacttgttcgacggcaggtttcaactttgcgagtcgcaaaaagtacatgtcgtcatattgctgctgatagtgtcgtcctgcgccagctggtaggtggaaggtataaccaggaccgtaataggagtgattgcggtaaattggctcttgttcctgttcctcctcgctatcgcagatagttagcgaaagctccccgaaacgtagcagcttggatgcagagtggattaagaggtattacctggggggacacaagaaagtgtaatcctcggcgtccggtaccatattttgcggaatgatgttgaggccttgtgtttcggggatggttgagatgaatcgtgatgcgaagaggtgtgtttgacgcgctcacgcgtctgttagcgcgttcaattacattaccgctttgggaatctagtgggtcgatgtaattttatatgggagtaatcggactgactcctggaatctgctattattcccattaacctgattcatcatactattcttttcgttttctagttttcacaaattccttaggctcaaaaaaacgaagtatgtattttgtacttcgtagcgacagatcacattaagccgacctcgggagttctctgtgctcgatgatacaggaaaagagtgtatacttactgagatgtacgattcacaaagcaccatatattgtacccaggagcacatatggagatcggctaacagatgcctcggtccgtgcatatcttagggcttccccgcatttctattcttcatatttgaacgtggaacatctatacactctccatatctaagaaagcatcgagacaagaccatctcttagatccacctacttctacctctgacaatctaccatagccatctctacaacccaaaaacaatgtctctccaaacaccactatgctctctcctcaagattcaacacccagtgctgctagctggcatggcccgcgcatctggagctccactagcagcagcggtctctaatgccggcggtctgggtacaatcggcggactaggctacacaccagctcaactatcagagatgctcacggagctcaaatcactcctccgggacccctctctccccttcggcgtagatctcgcccttccgcaggtcggaggttcagcgcgtgcaacaaaccacgactacacacacggccagctggacgagctaatcgaggtgaccatctcgcacggcgccaagctcttcgtctctgccgtcggcatcccgcccgcaaagaccatcaagcggctccacgaggccggaatcctgattatgaatatggttggcgcaccgaagcacgcccataaggcgttaaaggcgggggtcgatattgtatgtgcacagggcggcgaggggggcggtcataccggcgaagtgccgttctccgttctcgtacctgctattgtggatgttgctcggcagtataagagtccgctcactgggcaaccggcacttgtcgttgcagccggtggtatcaacgatggccgcagtctggcggcgtcgttgatgtttggtgctgcgggtgtttgggtgggcacgcggtttgtggcctccgaggagagcggcgctagtcgcttgcataaggaggctgttgttggggcgcaatttggcgagactaagcgcacgctggttgtcactggtcggcctttgcgcatgcttcctaatgattatattaaggaatgggaagcgcggcctgctgatattgccgcgctgacttccaagggtgttgtgcccatgatggatgatttggagaacgacaaggacaccgatatgccgtttctcatgggcgacgtctcggctagtgttaacgagattaaaccagccggaatcattgtgaaggaaatggttcagcaggccatcgaggtgctcaaagtcggaggctcatatatcacttccacagggtcatcgagtaagctatagatattaggtaaaagttaggatgcatcatatttgccaagatttttttcttgttatactatgacatgtacttgtacagaaaatatgaaaccaataagacttgaagaaaccaacgaggaagatggattatgccttggtaattaccgaggaatatcgcgagacagacaaaaaatagatggcaaagaacttctacattttcgaactcaacccgaatcttcagatctctgtaaacccaaggcaaacccaagacaaactgaagcatttgccttgggagaaaagtacgaagtccaagaccgaatgttcatggaggtagccaaagtcgcttcgatcaaaatcgacgtcaaataaattggaataatcttagaaaaccaagccattgactcccgcagtgttgccattcgctcgagcttgcaaaagattcgggggcggggtgggaccgaagacaggcttctccgagggttgttcgacccgggttgggggtggctcgagatcttcctcatcactgatatcctcctcgtcatcttcgtagtcatcgtcgtactcgctttcagtgccttcatcatcgccctctaaatgatcatcgccttccgctagagcaagtccttcgcctcgaccctgggcttgcatacgccgacaaagggcttctaggtggtggcacttccgtcgccaccgttcaagttcttcatgatttctggtccgttcctctgccatttccagaatattgcgattagtttgctcgtgcttccgattgagagtatgattctccttctctaggcgcttggttttcttggacatttcttccatctccttgcggaaggtaaggaaaagatcgttgctgttgttcaaagtgtcctcgacctggtggtcttcgtcagcgaccggggagtgagacgggttataggaacccttctgtacctgtttgaatttttccacatagatgttgagttggctgcgcagttcagcctcggtatgggagaaagtggaaacctgagaggtcaaagctcggcttcggttggcttcaacttcaccagcgcggcgctgctcctcaaatttggaagcgagactttgaatctcggagtccttgccacgtaggaggcccctgtaatgcaagtcgcgtgtgtcaaactgctcgctaatggtcttaagcttggcgcggagtctataggttccgattagcaaatgtgaagctcggagaaggagaggaactcaatcgtacgcttcatccaaatcgacatccaccttttcgctacgagggttccctttggcagccatgacgtcttgaatgtcgtaaaggagcgagtcgagacgttcgttcacaatcaagcgcgctttcttctcagtgtcctccagcttcttattctcatcctaccaaatcgtttagctggcaagtcctccgcggtgtttggcgcaatcgtctcgaggcgcatgctgatggacccaccttgacctttttgttctccttggtaagttctcgacacagcttctctagcttgtccttcattgtaacggtcttgttgagatcagacttgcccttatcctggtccttttgcaactgatcggcgcgcttcttgctcttagaataatcacgatccaacttcttcatatccgccaacagctcggtgtacttcttatggacggtttcgagtttggtcataggggattcgatattgctcaaaagctggttgagatcacgggttgctttcttgacctcgcgctctgtatatcaaaatccaagtcagtgacccttgttccagactaaccccgcagtccagcggtaccaagcaaagaagaaaaatgccgccgcagaatacaaagggagtcacgcaccaatttccgcctcttggtctttctcgccggcggcatcttgctccagctgggagatcttggcggctaaaagcttggacgtctcgtttggatcggccgctttcttcaccttgttcttctttgccatggaggtggacgacatttcaaggtatttgcgtgagtagtgcaaaaacagcgtatttggcgattcgattcacgagggggttggtacgaaggccggaagccgaaaatttgcgccgaataggcgggatacagggcaggatgtagacggatcaatcacacggaggagagatcccggaggcaaggctcacgagcgggatcactggccctaggatgtaaggatcgtttgcttgtcgtatcgttcgggaaagagcaaatgttggtcttcggagcagaacttcgacaagcgggcggccagagtgaggcttacgctagcatagatgatgtaagcctgggcggtggaacctccagggctggacattttcgactccggggttgttcttaacgatcgtcaactacccataattatgttgcgctcatcgatgcgcctcggtacagctcgagtgcccaagtctaatccgcttattagtcgttcattgaagtcaacgcaaacggtccttccacgcaatacccggagagccgcatcgacggtgaccaacttggataactttcccaaggtcggcgagaagctccacggattcactctacaggagaaaaaacatgttcccgagcttcatctgactgcagtctggctgaagcatgaccggaccgatgcggactacatgcatgtcgccagagatgataagaacaatgtgtttggaattgggttcaagacaaacccgccggatgctactggtgtgcctcatattctggagcatactacattatgtggcagtgaaaagtgaatcatatcatattcaatacctatatttttgctgaccttatgctccttcaagatttccaatccgtgacccgttctttaagatgcttccgcgctccctatcgaatttcatgaatgctttcacagcctccgaccacactacatacccctttgctacaaccaaccaacaagatttccaaaatcttctttctgtttatcttgatgctactctacaccctcttctcaaggaatcggatttccgacaagaaggatggcgcttgggccccgaggatccgcgtgctggagagtcgattcccgggcaagctgaaaaacagctatcattggaggacatcgtatttaagggtgttgtctacaacgagatgaagggccagatctctgatgcaaactatctctactatattcgtttcaaagagagtatctttccctcgctaaacaactcgggtggagacccagagtatatcacagatctcactcataagcagctgacggagttttccaaacgcaactatcaccctagcaactccaagatccttacatatggtgatatgcctctggctgatcacctgcagcagatcggtacagtcctggatggctttcagaaagggcacgcggatactgatatcaagcttcctctggatctcaccaagggacctcttaatgtgactgttccgggccccatcgatacgttcgccagcgaagacaagcagcacaagacatccacatcctggtacatgggtgacacaaccgatattgtggaaactttctctgtaggaatcgtttcctcgcttctcctcgatggctacggctcacccatgtaccgagcccttgttgagagtggtctgggctcttctttcacaccaaacacaggtcttgacccatctggtcggattcctatcttctcggttggacttaacggggtgactgaagcggaagccccgaatatcaaaaacgtgattcaaaacgtcttccgggaatccgtttctgctgggttcagcgaggagaaaattcgtggattccttcaccagctggagctttcgctgcgccacaagactgcaaactttggaattggtgtgatggagaagaccatttcgtcttggctcaacggctcaaaccccatgaaagagcttgcttggaatgatgtcatcgacgagttcaagagaagatatgctaaacctggttatctcgagtctttggtagagaaatacctcataaacgaccaatgcatgacctttaccatggtcggtactcccactttcaacaaagagttggacgagaaggaggtggtgcgaaaggacaagaaacttgcccagcttattgaagagcatggatcagttgagaaggctgtcaccaagcttggagaggaggaattggaacttctcaagatccaagaggacgcccataatgctgacctgagctgtctcccatcgttgagagtcaaggacatctcgcgagagaaggaacgcaaacctgtccgagagtcgaaagtcgagggcgctgacgtcgtctggcgtgaagctcccaccaatggcttaacctacttccaggccttgaatgacttcgttgatttgcccgatgaactccgattgcttatgcccctctttaacgactgcgttatgcgtctgggaactgccaatcggtcgatggaacagtgggaagatttgatcaaactgaaaaccggagggatctcaacatcgtcattccttgtgtcgtccccaacgcacttggatcatttcaaggagggtttgcagttctctggattcgctattgacaaaaacattcccgagatgctggaaatactctcggttttggtcacagagacggacttcacaagccctgctgcgcctgcgatgattcaagaacttctacggatgacgactaatggagctttggatgccattgcaggaactggtcaccggtttgctgtcaatgctgcggctgccagtctttctcggagcttctggatccaagagcagcagtctggccttgagcagctacaggctacggctaacctgctccgtgacgcagagtcctctcccgagcgtctccaggagctaatcgagaagcttcgccttatccaatcctttgccatctcttcgtccaaccttcgcgtccgcgtggtgtgtgaaaaggagagtgctggcaacaacgaattgattttgcaaaagtggatttccggactgcctcggacacagtccccaagcgccaatcttaccacgtcttccttcaagtcagccgacaaggctttctacgagatgccgtacaaggtctattattctggccaggctcgccaaactgtgccattcgttgacccatccagcgctcctctcagcatcttgtctcagcttctcacccacaactacctccaccccgagatccgtgagaagggaggtgcatacggagccggtgctagcaacggacccatcaagggtatcttcaccttcatgagttaccgagacccgaatcctctgaattcgctcaaggtcttcaaaaacagtggtatattcgctagagatcgtgcttggtctgagcgtgagattgaagaagctaagcttggcatcttccaaggacttgatgctcctatgagcgttgatgacgaaggggcccgctacttcatgagcggcgttacccatgaaatggaccagcgctggagagaacaggtcttggatgttacagccaaggatgtcaacgcggtcgctgagaagttcctggtgaatggctcacggcaagcgacttgtgttctgggtgagaagaaagactgggctgattcggaatgggagctgcgcaagctttccatggatgccgccgcataagcgatatcacccaaggatcgccattcagcagttgcctctttgtttttgcacaccttctccgaactggacatgatccttgtttagggaatttgtatcaccacctcacttccctgtgtatttctatatacttcactttcctccatcacaccctacttcacaccctaccttgtacatatatcgtgtatatcccatttgtatacatctctattcttctgtttcctccctgttttcatgtcttcccctgccttgacccccaacagcgctgaagatattcacgtgcttcggcaccgagctaatcacatctacaaccagtcactacctttggttgcaagatgtcgcattcatttccatcaggatgctcgcgcaagaacaaagggaatgtgaaccgccaggtacacttctcttctccgtttttcagacccgtcctggatttataagtctacacaggacggactaaaaacgagggaacataaatatcgtcatagaattcatagaattcgtaaacttcgtagaaatatcaaagtaaacaaatcttggaatctttcaatgtctttgactaaaagaatgaggaatgataattggtctctgctaaaaagcggagaaatggtgattccccaccgctgataagccccgatataactgtttctctttacttcttctccggttttttgatcagttatcaccgcgagtaatggagagtgactctgagtagccatgaagagatcgggcgccatggtcggcccgaagccgaccaaggcctgtggtgagtccgagacggcattggtattgtagagaaaagctaaccagtcaaagtaaattgccgacgactaaaggtatagacagactactttccaacatactagcaaaaagaccactcacatgaatcagatgaaatgcgaagtatccggacctcctccatgtcgccgttgccgtcacactcgaacagcctgtgtctttaagccccgggccaatgtgagcaaaggatcacggaaacaataacccagaaacaaagctaacacctcgtcgaggcatctgcaatgcatgaattaatggagatgcagcaagatcaagcttttgcttctctgtcagtgatcccggatcatcagtcgattttgaaccggctggccaggatcgaggccgcgctaggtatcactgaggaaccccaggaccccgaagaccaacttagtatgtctcgtggggcaagtctcgaagaagacacggaagtcgtgccactacaaggtgtatggacagcgcttgcgcatttacgactcattactcgtccgtctccagatgatagtatctggtcgcgatccgttgttcagcagctatggagctcgtaagcactatttaaatcaagatgtgacggccgatatctaacaatatcacagtttcttgaaaagtctcccacttctgcacttcctaacagatcatagcgcgttcgcttcccctacccctgtcctgctcgcttctgtgctttacatatctgctctacaccatccgtctgctaggctggcatctttgaactcggaatattgttccgctatgtatagtgctatcgctgagcttgtgacaccgtgtctgcgtggaagtgacctgcaggtatcagaacacaaggacgaagaacaaaagctctccccacaatccaaaagagagaaagcatttcacgatatccttgggttaataatggctagtctgagctgcgaggcttatgttggtgccacaggatcgtggattgcaatggcatatcgtatctggcttgatcattgcccagcagagatgaattccaccacgaaagactggcgtggcttgttctccggtcttcaggtaggagcaggtaacaaatcccgagattcggatactttatttacgtttgttggcttcaggtcattgatatcgaacacgcctcaatgcacatgtcctatccactcctcccacgacatgctgcaaatccaaatatacagcggctagatagccatgaaggaaatgccttccaggaccttgcagaaatgatgcactttggactgagtcattttgtcggtcgtgggctaccgagcatatggtcctctctcaatgcagatgaggttgacatcgtgcctatagctcggtccccgtttactgaaaatgactcgcaggtcatccggcactgggcacggaaacttgatgactggctggtacgatataataactcatcccgtaagtatccatgagccagaatacaatctccggggctgactgttggtagagcccactccgtctgatcggcaaggtattctcattctgctccagtatcacctgcacaaactatacgtgctttcgatctatcatcctgctcgtggatttgatctcagtcctgcgaatattagttcttttgagcgacacgagttgctcgtttcggctcgggcagtgttgaggctgagacaagatgatgcgagcatatggtctaactgggacttggttgtaagttctgatccagagcctataattctatttttaacaacatagatgatcacatgggcggccgtattacttctccagggtgttgaagacggcatgactcacccagatggtatggcatttcgaaaaacagaattatcgacctcttctaatgttcgttctagatttacacctcatccaagcacatctccaaagtctagaacgaaggaatcagtccgctgcaagcattcatacctttctctcccaccgacttgaatctagtatgcaagctatgcataccccgccagacacaagcgtggcattatcattccctctcccaagcgcagatgactcatggactatatttgaccaagagataatgtctcttgcaaacccaccgtggttattcgatgaatcaacgcagctgccgcagatccaaaaggcttccacaatgcaccaattacagtctgggatccaacctttccagtacgactctgccatttcagcatctgcatcccaacactttgcaccagatacacagtagggttgcacagcggcgaggtgcgggtgttcagccgatcctcggtgtagtataatcaaccccgaaaaggatctagtggtgcacgaagaagcactgattgatgtaatctagaaacatgctatatacaattcaaatcacaaatgatgaaggaactcctacagccttcgaacactaaatctcagcttgaaagtgtccatcccctcatggtagtctttcatcatcttatctgccccagcccatttctccatcctagtctcaacctcccatctcgtccccgtttcagtacccacctgctcccagaacttcttccacgtagaaggatcatgacgatagtgctccccagaggcctccttatcttctggaggtggggggttcactaaaccaatctgtcgcccgattagaagggagccgggtttatcctggagtaacccaacgagccgctttgcgactagaatctgctggtcccaattgaaaagatggaagaaggaagcggcgttcacaatatcgattttgtgggtcagttgcttgactaggtcggaattgtcgtcgaatatgtctgctacaatgaactgggctttgaggtgatcgcggtcgttgaaaagctcatatccaatgtcgtagaagtcttggcgcaagtctgaagcatatagattttcagaagcgaccccgtcgaagacctgatttggtacgttaagttgcattcattgctctagaccctgcatgagctgtctggggtcttaccagttgacgcagctcttgcccgactgcacatccgacatcgagcagcttctggccagacttgagtctatccaggatttcagggtagagcggtgactgtgggatgctcaagtctaggaaccggaatgatccaatacatgggtacggaaactggggataattatcagtatcttcggccaacgagggaatcgtgaagacaattgcgtctgatgaaaaccacacaggccacgcttgtaggacatattgtcgggaagaaatatctaacttaccacagcgaatgctcgatctctctgattcattcgtcattagcgtgggcactctcgccatggaatgaaaaggactcaccacttttttcacatgttcaacctcgtgtcctggtgggattttgctgtacttctcgagcagagactttgctggctcaggaacctcaatcagttctggctcgtaccaggcgaacttatgaggatcaaagccgccatcgagtatggatctgagatcggactcggctttggccatcctggatgagccgaagttcgtctgtggtgcgaagcctgtggtgcaattgagcaatcctgtgcgatttggatatcgcagagcttggctgtgtacttcagtctcgtacctggatagaccggaagagcaattctgttgaggatgccccgcgtggggtgtggggacggccccacggtttggttctaatcgagaatgaagttcatctcaatggaaggtgaagctcatgaagaggactctaattaaagatccgaattcaacattcaaggacgatagcgaagcgacaaaagcaattggatgttgggaactgtgcaggagaaaattggcaagatttgaggaagatctatgagcctagagggggaatctcaaaatcaatcaggtttatcatttgcaatttaaaacgctcgagaactcctggcactctcgagactcttgaattcataggggtatagtaacaaaatcgctcagaatatcatacaaattaggtgatcaatggcaaaggtccacaataatcacccaaagcaaattacagcaatgcgtgtgaagactcgttaacacgatcaatcgagagaagtcgtatttccaccaagctcatgtggagatatagcccttggtgaggatttcgataatcccggagaatccatggccaaagatgaaggcgacatggataggcgtgggaatggctcgagttggttgtcggacaaccggcggcttgatgactcgctgaaggtctttttggaggtattaggttgctcttgtggtcggagacttggactagcggatattgcggcaggctaaaatgtaatctggttaatttcttcttcatttataccggaagatgaaaatctcatactttatcgctgcctcccggatcaaggcctcgactcaaagccagctcgtgtgcagcgagtcgtcttcgcgcaatatccgattcttcttccaatgccgcgcgctgctcttctgtcttcaggtctgccatcgatggtgtaccaacactttgagcaatcgcggcatcattgtaactagtcgaccgctttggggaccgtttcttcttccgctttgtctttctcgaggacgcaccacctagactagacgcggatgcagactgtacaatttcagacttcgccccggactgatcatctgattctaagcccgttccccggcgcgcaaaagcgagcgcaaactcatcatcgaggggcactgcatcttcctcctcgtcactagggaatagatccccgcgggaactaagtgagttgtccgttccgcgagaagattgcgtggtactgcgattcctcctattatggatgggggacaattgatcctcctcatcatcgtcatccatagcctccattagtggctcgtcttcgtgcatatagcgccgggcgccggggtgttcttgcagatctgcagctgaaggacgatacttgactcccctcgcaccgaatctccacggaaagcgctcgaggaagccgaggaatgaagagcttggaatcacagtcgggtcagcgcgattgtccggaatgtgcgcggtgctccttcgcctagtgttttgtgtcccgtagctcatcctcctaggccggcgcggctggtcagcagttccgtgcgccagcccgctgccagcaaggaggcggtcgagttcaccagtaccccatccaattaagccatcatcttcttcttcgttggcccagtcgtcgtaaaagtcaaagttggcttcggtttggccgcgtcgtcgccgccttaggtggtcttcacggctcggaaggcaaggtgctgtacatgcagtcacgcaatttccaatggattcaaaacacggggatatgtagttgtgggagaaagtataaagcccctcttgcgcggtttcgttggcggtctcaaggttatgggagatctgattaatccgttgtcggatgcggggatcgcgcggtcgcatcatattgggcaacgacgtgaagaatagagactactaatgacggatcttgtgtgattcgctccaccagctgtcgccggcgacattggaaaaatgtacggggagtaagcagaggtaagtgaggccgcagcatgaacccgacgatgtcattccttgctgagtcagcgcggataattttggcggaaatttgggtttgatgaagatacgattaggacggagaggcattgagggaggaaagcattgtattctatatctccaagatggtctactatgttagattcctgaaaacccccagaatccaacaacagaaaggggccatctacatctccgctcttatctgcatcaccactgatctaggggactcttttcttgctgaagatgttgatttgatggtgatagctgagaattcctctcgagttatatttcagaaaacgacaaaatggaatgccagtaatcgagaacttgctattaccctgggtcctctcccatccaatctggcccagcagtctatggtgttgacggttaaaatgccggactcaccagaatatgtcataccccagtattcccccatacaattagtggttgctgcaacaagtgctccatttgggcctcattccacaccagcagagaagctggttcaacgccgccttcaatacagcggctgtgaaccattccccatggaaatatgggaagagacaggaaatagcattgctcgacacatatggtaagtcactctgctacttccctttggctttttccctcgagattctaaatacaaattcctagggatgcgggcctagcaacagttacataccttcacctgatgtgtgaggatataaggaagacggcccgtaacaagaacaaaggccctgaacctaaaatacaagctttgaagcaggtcctatccgtctgcaaccgacctatccaggtagttgagcttggggcaggatgtgggatagcgggaattgcattggcatcaatgctcccgaattgttcggtattactcacagatctccctgaggttgaggagataataacacgcaatatgaatgttgcccaactcgcaaccatgtccagtcttcactatcaaaatctcgactgggacgacccaccggatgagctctgcccacggcctattgacctcattcttgtctctgattgtacctacaattcagatagcttgcccgcgctagtctctacgcttgaccgattggttcggacctccccagaggcaatcgtcttggtggctctgaagagacgacatgacagcgaaacggtgtttttcgacttgatgcgctcggcgagatttacggcggtgcaggacagcgttgaaatcccttcgcagcacgatgaggtggatgaaattgagttttactgctacagtcgattaatttagcatgagaatgaccccctgggtggaaagaaaatatacccccaatcaataaaaggacgacgtcgaagcataggtaacaagaagcgagaggatacaacggccctgtatgaaggatctcgtagatgctccaatcacgacaatgcggttttttttcccggaaaatagttctgtaatttataccactatggcgtacaatctacatctgactattgaagatgtctactatcaaacgcagaatacatgctgggatcgcactgacactaatcaggtggagatgagattaagcatcgaggctacgaaacaatttatacaagtgtaacaagaataacatagacgggcatctcacggcatacctcgtttatccttggtttttacattgctaaggtatcttctctggcatctcggtgttttgcttctcggactataaaaggaatcatctagtaagagagggtggatcgttccccaatttaacgatggtcccgaggaccacttacaaaccagcagaattcaaaggtggatatagctatattcataccagaatgaagtcaccgaagaactggaggctaaataagatgatctacgttttgctgactggatgccttgagtcctcggaactcttcgcggtgtacaatttcgggtttggataaagtctatcaagcctctaggtggccgggatcaatacagcaagactattagtgctagcattgggctaaatatgtatgctgcattttctaaatgaccagtcctatctataacataagctgttgatattcttgtggtccgtgcacaaagtggacagctgagtggaatcgagtgggatcaaatgtgcgtcattatgggttctcgcccaaggcctattacccaagagcttgacctcaagcagttctgggcatatgtactgtaactcggcatggtgcatagaactacctgcaagtatatcacatagctctatatggagtacggagtactccgtaggtgcataactaacaatttaaacatcccggtaggacagtacgaacagtactgccacgtatgtacctgaatgtacgaaagtacctgggatctactcccgaggtctgctcggagggcaaatcacagatacacacacacaccgctgccattgaatccagcaattccgagagcatgggatttagctcctgcatcatgcagtcgcacctaggaagagaaagacctatcgcagagccggcgagatggtaataatggatgcctaaacaaggcccaaattaatcgcgcaggcttgtccgaaagagtaatagaggggaagctcgtgaagacggaggagctgaaaagccctggaaaagccctggggagctgaagaaaccctttttccggctgagtcagcaccgctcttttttcctcgaggtagacgaagggcttcgtcatcttttcagggcttctttcaactctccctttttctatttgggtcctacagctcctcattttacaaggtgagtctttttattttcaggttaacttgattgggatccccgtgtgtgactccgtgccgcgttttatttcctcgtgtgccctaagctcgctcactgcccccccaagaaaaatttctcaaaatcaaaaaccctcgatttccccccccccttcctctcactcatactctccccccctcttatagttctcatagcagctggactatatcaggcttgctaaccacgtctctgcccttagatttattcggtcctctaggtcctcttttcagaccctgcctttggaatccccaaaggcgattcggtcaccacggctccagtagcctatcttctggttcttagccaaattgtctccacccaacgtctccgcgacactcttaacaacattccacctcctggtcttttctgaactctcgtccggttcgcctattttcgtcccgttgacgtccccggagattatccccccgttctctgagctgccgcataggacttctttcaaggttcttcctcttcagggggaagggtctaggaggcttggtccagtcaactacggttgtgacacttttcgtcctccctaacgcgcagtcgcctgccgattaaaaactttctatcatctctctatttctattcaaattgtgctgagtcgcagcggcatggttatggcaccgactgcgtgtgtatcgactgctgaagtatgcaccttcagaaaagactataccaatagtctggaccatctcggtcttgtcagcagtcatggcggggacaacaatttgttgcaatcatcgttgactgccaaggagcttgttctggatgtgttgaggaagcgtgcggcggaggtggatttggaccaatgtggtcctggtgaggaggatcctttttacgttgcggatatgggtgaagtctaccgccagcatatgcgctggaagatgaatttgggccgtgtcaagcccttctatggtaggcctcactctttattcgacagcccaccatggacccctgctaatgaacactgaacagctgtcaagtgtaacccggacccagaagtcctccggctcatggcccagcttggaaacggtttcgactgtgcctccaagtctgagatcgatatggcccttcagacgggcattgatcccagccgcattatctatgcgcaaccttgcaagaccaagtcttacctgcgctatgctgccgaggtcggcgtcaagcagatgacctttgacaatgccgatgagttgtacaagatcaaggccaccttccctgaggcggagctctacctccgcatcttgaccgatgactcgaccagcctgtgccggctgagcatgaagttcggtgcttccatggaccaggctcgtccgttgctcgaactggcttataaattggacctcaaggtcgtcggtgtcagtttccacgtcggatctggcgccgaggatccccgggctttcctcgaggccgtgcaggatgcgcgcacagtctttgatcatgcggaagagatcggccacgagctccacactctggatgttggcggcggcttctgccaggacacatttgagaagttcgcgggcattctgggcgaagccgtggacacttatttcccgccaaacatccgtgtgattgccgagcccggtcgctactacgtagccactgcctacactctggccgccaatgtcattgcgcggcgtgacattccgcatcccgatgatccctcgcgcgatgctttcatgttgtatctgaacgacggcgtctatggcaacttttcgaacatcatcttcgatcaccagcatcccgtcgctcagattctcacctgtgcctcggacggctcccagcctgcttccccgaactctgcgacttcggaggacatcacttattctatctggggccctacctgcgatggcatcgatgttataagtgaaagcattgccttgcctggcctgctggacactggcgactggctctattttgaggagatgggagcctacaccaagtgcagcgctacccgttttaacggcttctcggacaaccacgaggtgatctatatttctagtgagcctggtgcttccgctttgctcaactactagtttgaatactgttttgcttcacaatcgtttacaattgtctttttgttggaatcgctttttgtttattgacctctacccggaggaggccgtctaatatagtatctatcgtgcgttctcgctgcatatacgatcgtattttttgccattagattctaaattagaatagagcttgtcgtgtttgcatcaacgtccattgactaggtatcttttggtatcttttctgctggacgttttgctatattgttatcgtcaatgctttcgaacataagatatgaaaagtcttgatatttatttacaggtgtatcatgttctctatcatcacatctacaaggtatcatgagaaactagtccgtaccaacatcacggcatctatgaacaagagctggcctcatcaaaaatctagaccaaacgctccacactcaactccacaccctcttcctcgcctgcctgaatcagcccaccagcttcgagcttcttcttccacttagccgactcgtatcgagcaagaatcaatgtaatgcgggcaatgacagccgggtctgcagactcggcaaccacagcggaaggagtgcaggtccaacgtccaaacgcccaattgagaatataatactgcatgccaggcgactcgagcgtctgtctcgcattcaaatcatccgatgtctccaccggaagatcctggttcgagcagcgaacaatccccttgatgcgatacacctcctcgcgaggcgtcaaagagagaaaccgctcgagagcagcaacatccaccgtcttcccctggacatcggacttcaaaaccacagacagaacctccacctcggactgatgatcatgttgatgcttactctcatgtccattgccagcctcttcctccttaaacaaagccccatcaatacccagcatcacttccatatcaacccgacccttatccgacttaacccaaggtgtctcaatctccaaatcaccaactcggtccagacaaacatcaaaccgctcaggcatatcctcccacttattaaaaacaatcaaatcggtatacttggcctggatctttgccgtgtacgaggtatcctcatatccctcccagttctcgacatctataacactaatcacaccatcgagaacgtaatgtccaccatgctcgcgcgcaagcctgttcacctccatcgcaagcgttgcggggaacgcgctgccgctggtctcgatcacgatgcggtcgggtttcacttcggcgcggagctggtccagtgcgtcgctgacttggccaacgaggttgcagcatatacagccattgagcatttcgcgcacgccgctgatggattgcgttgaggccagttgggagtccacggctacgtcgccgaattcgtttttgaggagggccagcttgtaggtctttggaagttgcgggattaggttgaggaggatggttgttttgcctgagccgaggaagcccgtcacgatggttatggggattggcgccattttggggttgcttggcgacttttgttgagtctgtggttgttgctttctgatgttggcggcgggaggctatcgccgatggaggggcactagccctagtttaggagccctaattacctccttgggattgttgaagaaatataaagcgtatcttccttttaataagaataaagtcaaataacatctctaccagtatcttggaagctcgtagttgttcataggatatacctcgaaatgcgagagttgagattgagtagttgacaagaaaccttccagagtaggtatattttatatagttacatcgcaaggtatgaccaaataggctgtacagtaattcagacctagatgagcatgactgtgcacagactatccgagaaatagcagttacccaaatccagcccataaaccacgatatcgcacgaagtatcaatgtctcgagacggatctattcttcgaacccgttgttcccgtggtcggtctatcgctagccctatcccacgatcgatactcagatcgctcacggcgagagtgacgtgctggtgcaccacggttggtaaccaccgagtggtctgtgtgattgacggactcttggttgtgttcttgatcggattcggcatcgctggaccgattcatacttccggatcgggggcgcattgtgtatgatagagtttgagaagaagagggctcaagttgattattgtgaagtcgaacggtgatggtcctcttttatacaaagtggcggcggtggcacacttgacccaaacattgacatttacttcattgtgaacgcattttgatgcaattgacagagggtccactggaggaattcttttattaacctatttaacgatcgctgcttgggttcatggattgttgaatcctagccggtctgatatattcatgtactttctacctacttaagtagcatagccagaaaccgacaataaagaaagaatgcgaaccaaatagacattcaaattccgagtttgcctaaggacaaagagattcaggatcatgtcatatatccttaaatctcaaggttattttatagtcccagtcccttggtacctccagtcgtatttggttagctgcataccttaaattccaccgaggttccactatgcctcgacattgccccttcgcatacattgcatttcatgacaatagtttttatctacatgactctagaattcacccgcctttgcgaattgtgaataggatattgtctgctgtgaatccattaccatattacttagcagtggaactacttaacctcgtggaaacgcgaccgcagcaattattcggcccgtagatgaacaacccggacgtcaaagcccttcttaccgcaaataccaataatcctttgacccggggactttcaggttgccgtggttcgagtgtacgcgtcctcagggtgagatcgagtgtttctggttgacttcctgggtttggatgtgcgcactcgacagaggatttagagcagctgtctatagcctgagcagtatcaatttggatcgagtctcagcattgccactcaaatagtctcagtctctgcgacatccttattatacatgtgaagtaatcagcgagaatcctgcccccctagagaggagatgcgatcggtgacattcggaatattcaacaagcggcaaaagacacgaattattcagatccccagtcaatggagaataaaatcccaaaacgccaaaaatgtatgatctatctactttgttggctgtgtgtgcttattgctcatatgtctctctcgtaggaaatcgcaaacctgttcgttgctcattttatcaacgcattcgcgttcctcctgggaaggttctaaaatataacactgtcatcagcaatcaagtcatacgtgctgccaggaaactcatgcatgaacatacctggaggtaccatctcctgagcttcatttgatccacctgaaatggcgcgaatgtgaccttgaacggtacgtaaggctccctgcgcagcaggatacgcttcgtccattaaagtatccttcgcggcgatcatcttctcttgggcggcagagctaacggaatttccaaactccgacatggagccaccaggagccatcgagtcgagttgatgtttcatgcccgtaagaacaccttcctgtccttcctgtccttcggctttatggaaagcggcgtcatttgcctccatctcgacctcggattgcctccgttgtccgagtgcaacattggaatccaggtacaatgagtcgctggaggggtttggactcatggtgaagcagtttgctcccttggattgggagtatttttcggattctgggaatgacatgggcgcggagaataacgaagtggaattagaagcaaaaatggtaatggtaaggcgtagggctgagtctgacgtagggctgatatcgggatctgttcgggtctagtatcggagtgggcagggtacaacaatagcgagtagggctattgaccaggattctgcagcaggaatctcttttgggtaattgagtgattgagtgattgacattgtttcgctggacttttccccccgaaagatgttgctgatcgttcctagaaatgacgtcactggaatccacctgcagatgcgttcatcggcaaaggagattcggcgtactctgctctatttttggatactacactattcattcacttccaagtcggaccgaggttctttatcacttgaatttgaactacagttgctctttgctattttcataccgggaaattcaatcatttaatgcaaaatgcacatcatataccgacccgattagttgtagatcgccgcctggaggccaggaatgatctcgagatccttcggcttataggtgtatttcccctcactagaaatcttgacatcccgattctttcgctgctgctgtgtctgtcgaactttaacccactgctcagtcgtcaggtgctgtccaagttcggtgaacgcgttggtagtcaagccaagtctctggaggagggggctgttctgaattgggtcaaggataacgtggttgttggggctatattcattagaccctgaagactccggtgccgcatagccgaaggaacttaccgagcaaaatacaacacacccaatcgatcaatatgagcctggtcagcagggggtgcgtggacccggtgaatactcgacttaatcaagccacccgtgagcgcggtgagggcgtcgcatgtgttgatagtaatggtcccgtcctggggcttgacccacttccattgaccctctgagttcaggatctgaagtgcagctaccggttgtcggaacagaagagtaactgttcccaagtctgtgtggccgggactgtagagctcaccgaccttcttgttatcctcagcgctgcgggctgcataatgcatatagcgcagatgatcctcgcccttgaggtcgtattggtggtcgcggactagttggtcttcgtctggcagctcgagcaggattgcgaagaggcggagaagcttctcaacaacttcggtgtggcatttctttagttcgggtcagttaaaggaatagacgacgatgataaaaggaaaattacccgactgaaagtttcaatctccttaatgttttcggcaatgacagagggctggggacgctcgtggtaaccgtcgaactttggaatattgtatacctggacattatccttgatgccatttcctaagctgagttacgtgttagcgtttctccaatatgtctctgagggcgatctgtttcttacattcggtgccctgcaggacggtaagagttatattcacctctttcaagatcactggcgctgtggaacttgagtttctcttcaagtggcagggcatagaactcccgccctagagcgaactggttgtcgatctcttcttggctaatgttaaagttcttaacgtaaaagaatcctgtttcaagtctgattagcactaagccaaggatcgagcctactcgaattcatatccccggcctcagcacggagcacaaagaagcgtcgactcaccaacatttctaacagcgtgatcgagctgcttgacaagatcttcctttcctccaggttggtcatactgggtaaggtccagtgtgataagctcagcccagtcaactaatcccggagcagtcagcaagacgaaaacaccaagaaatcagcattacccacggtcttccttggtcacagggacctgatcatatttttcaatgtatttgcccggcattttgggcaggctatgagtttccaagaggcgaacaagtatatgcagctacttcaagtagctcgtttccacatcaacaccttaggaaacacacgtcgtatataagtctattcgcacatcattccgacgatatacccccgcatcagatagcggagggattttataagagcacgcaataaattcgtccgatgaggcctgagataacggccaatttccggatttcgtgtggtagaccgggattcgcgcacgccatcatgcagaaacatgtcgtctccgccggcgcatcaaagtgaacggcaaatgtgttagcttcggttccagacgtcctttagcctcgtggatggtctgttttgactattaaaaattcctgaacgagcgatggtgacagcgagtggggaaattggttaacatctctacggctagctggtttttatatgccgagatgctatatcaagagatcctataagtaatggcggtggtctataatttaatgtgctttgtcttttgcacctttaggaacagcatcggacgtctgccgagccttccatgtctgacctgaaacccaaggccgggagattgtcccctctgggacttttcaaggaagtatttaattggtacccatcttcatatcctgccgaggagagaaagtaagcagatcaaggtttgggagagtatctctgtcgatctatactgacgttgccagattattattcaagttggatttgtccattctgatatttgcttgtctctgctgtaagtacacaagtccaaatgatgcacccgagagacgccactaacgaactcagtctttgtcaaatatctgggtaagcctatttccacattcaatgccctttgactcgatgccaatatatcgcagaccagacaaacattagcaatgcatatgttagtggtttgaaagaggacttcggtctgtacggcaatgagctcaactacttcaatgtctgctacttttgttcatatgtgctattccagattcctggactactgctcatgtcacgcccaaagttgtgagtatcaggaattgatctctttctcacccataccaagcgactgactcattctatagggctcgctggttgttacctacactcgaagttctctggggtatttgcacatttgcccaaagccgtgtcacgaacgtacaccagctctatgcccttcgtttcttggttggaatgctagaagcacctgtctttgctggaacgcatttcattctcggtaagttcaaccaatatatgtagtcatctggtatactaaccataaaaaaggttcatggtacacaggtcccgaactgttcaaacgagccggaacatggttcatctgcaacccgctcggtactatggttagtggataccttcaggcagcggcttataccaacctttctggtgttgggggtatgccagggtggaggtggctgttcgtaatcgacggcatatttaccatccccgtggccttgctcggattcctcatctttcccggtattccgggctcgcctaagccattctatctgacggaccgtgatattgaattggccaaggagagaactaagagagccaagattcgccagcctggcaaaatgagtctcgacgtctttaagagaacctttaagagatggcacatttgggtctttatcacttgctacgcgtaagtttggaaaggattcactgctgtagtcaatttactaacgttggttttagatgcatgatcatctgctcctatccaagcagctatatgagcctatggctcaaacaagagggatactcagtgactcaaatcaaccagctgccgactgttacttacgcgattaacatcgtggcctcatggctagggacaacattagctgcgatttatccggaatggatcatttacaccattgcatcggcatgctgtctattctcaacattatgcatgatagtttggaacatccctacaggcctgaagtaagataactccttaactagtcctcagattgagtccgtggtactaacaagcttcttcaaagattcgttgcctggtatgtcttcggagcggctggatgcttgagtccaattctatattccaccatcaatgtgatagtgagggatgatgcggaggagcgtgctctcataatggtacggcaattcctttatccagcggacaaaagaaatcatactgaccagcatctttcttgcattacagggctccatgatgacatttggctattcattcaatatctgggttcctttgctggcatacccaaccgccggccccgacggtgcgcctagatggcgaaagggatggccagtatcatttgtctttttcttcctgctgtgggctggtttcgtaacttctgtttacatatggcgaaggtaaaatcccgtcctgaaatattggtgaatattaaactgacatattattatagggagcaaaggaaacaagccttggtgtcaccccaggaaagtagtgacgaggaaacggacactgtagtagttgatgggaccccgacattgaagaactgaatcaaatctcgtagatggttcgatattgatcaaatattatctaaatatctcggatagatactaataaatggcgtttctcgtaatataaggaatagtccggtaacgacatctgccttacggtatactagggccttgggcggtgatctttaatgaaatttacattgtaatattgggacctgtgaattactgtatccggttagttttgcccttcttggtttagcgccctaatacgccgtcacgtaacctctcttcaatgccctccggcataaaagaccagtcttcgctgctcttcctccctttctcccactttttcatttttctgcctctctattttgcactcatcgccgccccctttcttttactctggcccccaccgagtactgcacatttgctttcagcccgatgtactgcccctttcatttttaccggagatgccgcttgatccgatatccagcttataatgcctatcacctagaatcgtaaccactgggatgatacagcatcctgtccttttgtgtcgatgatcctactccttccctagggcagtgactgagcaccatgctataaagatatctaggtctccctctgctagtgtgcctttctgtctctgactcggcgggcctccctttaaatctgtaaagtgctagtataccctcgacgctatatatccctctcctaccgccctacctaaggttacgttatatagccccggctttatagaatagctcctagttatctggctaaacgcccggttatcgttattgtcggtctctccggtccctttctacctaatcggtgaaaactcgaaatcacagctcggtcatataggctaatagcgaaaatactgtatacgccctagaccttggtcgatgctatatcttgtagttaatacgagactgtaactgcgggaatttttgctagtaaactataacttgttatagactgtgtgactaggatggtctagcgtcctcgactataataggttagattataggatctggttgagattatctactcttagtagaagaagaattctatcctccggcctctatcgttatctataaaagagactacagttccaataatatagtaaaactagaatttaaatcgcctttaaattctcctcttcgcctattccttattctctaccagtatctttattttataagtacctgtagtcaccatatcctaaagagtctttagtcgtctcttcacaatatatgtcaagtataagttttcccttatattttttttagccccggagttacgtataatacctcacccgactagacgctgatccttatactagtagccctttagagataaccccttcgctatagccctcttctggtaaggcgtagtaagatagaccgtagactctttcgaatgaaacactttgatctaataggagaaatgccgtatatatatcggccttacgcgtgacttagtgatttccggataggttggtagatctctgtatcggtagggtacgttttgtctcgtgaatcttgtaaatccgacctactcaaaacgcctagaagaggcagggggcggtaggcaggtataaaaggtcgttagaactcctcagactatggaagaggctaactacctatttatagttccttctcttctattctaatacattgcgtttaaatctttcttgcagtatggaaccgatcaattgaacgatatcatctattatcgtccgcctgctaaaaagaaaaaaaaaaaacgtttcaaactgttccaggcacccggttcctacgcctatatctattcacagttatcttcggatagacctacgccagcccatccgtttctacctagccagtactggcgtccgagtcttttattcccagggcatacgccgttcctctaaactaagactttcgactctcaagacattttgcaattgtaagacataccaggtatcgaatacattaattctataataatgcccgataacatttagacgctaagtatcgatcccctggtttaggatcgtgcgacttagagcctgccgttattaatagtcagtaccactcttaagctatcgattctagactagagagcttctaaacactgaaacaatcgatcccacgatcctcgacgatcatacctttctaggtagtaagtagacatcggcaaagcccagcataggcctaagatttcggcccatggcctaacctatataggctataggcccagctcccctaggcctagcctagcnnnnnnnnnnnnnnnnnnnnnnnnnnnnnnnnnnnnnnnnnnnnnnnnnnnnnnnnnnnnnnnnnnnnnnnnnnnnnnnnnnnnnnnnnnnnnnnnnnnnnnnnnnnnnnnnnnnnnnnnnnnnnnnnnnnnnnnnnnnnnnnnnnnnnnnnnnnnnnnnnnnnnnnnnnnnnnnnnnnnnnnnnnnnnnnnnnnnnnnnnnnnnnnnnnnnnnnnnnnnnnnnnnnnnnnnnnnnnnnnnnnnnnnnnnnnnnnnnnnnnnnnnnnnnnnnnnnnnnnnnnnnnnnnnnnnnnnnnnnnnnnnnnnnnnnnnnnnnnnnnnnnnnnnnnnnnnnnnnnnnnnnnnnnnnnnnnnnnnnnnnnnnnnnnnnnnnnnnnnnnnnnnnnnnnnnnnnnnnnnnnnnnnnnnnnnnnnnnnnnnnnnnnnnnnnnnnnnnnnnnnnnnnnnnnnnnnnnnnnnnnnnnnnnnnnnnnnnnnnnnnnnnnnnnnnnnnnnnnnnnnnnnnnnnnnnnnnnnnnnnnnnnnnnnnnnnnnnnnnnnnnnnnnnnnnnnnnnnnnnnnnnnnnnnnnnnnnnnnnnnnnnnnnnnnnnnnnnnnnnnnnnnnnnnnnnnnnnnnnnnnnnnnnnnnnnnnnnnnnnnnnnnnnnnnnnnnnnnnnnnnnnnnnnnnnnnnnnnnnnnnnnnnnnnnnnnnnnnnnnnnnnnnnnnnnnnnnnnnnnnnnnnnnnnnnnnnnnnnnnnnnnnnnnnnnnnnnnnnnnnnnnnnnnnnnnnnnnnnnnnnnnnnnnnnnnnnnnnnnnnnnnnnnnnnnnnnnnnnnnnnnnnnnnnnnnnnnnnnnnnnnnnnnnnnnnnnnnnnnnnnnnnnnnnnnnnnnnnnnnnnnnnnnnnnnnnnnnnnnnnnnnnnnnnnnnnnnnnnnnnnnnnnnnnnnnnnnnnnnnnnnnnnnnnnnnnnnnnnnnnnnnnnnnnnnnnnnnnnnnnnnnnnnnnnnnnnnnnnnnnnnnnnnnnnnnnnnnnnnnnnnnnnnnnnnnnnnnnnnnnnnnnnnnnnnnnnnnnnnnnnnnnnnnnnnnnnnnnnnnnnnnnnnnnnnnnnnnnnnnnnnnnnnnnnnnnnnnnnnnnnnnnnnnnnnnnnnnnnnnnnnnnnnnnnnnnnnnnnnnnnnnnnnnnnnnnnnnnnnnnnnnnnnnnnnnnnnnnnnnnnnnnnnnnnnnnnnnnnnnnnnnnnnnnnnnnnnnnnnnnnnnnnnnnnnnnnnnnnnnnnnnnnnnnnnnnnnnnnnnnnnnnnnnnnnnnnnnnnnnnnnnnnnnnnnnnnnnnnnnnnnnnnnnnnnnnnnnnnnnnnnnnnnnnnnnnnnnnnnnnnnnnnnnnnnnnnnnnnnnnnnnnnnnnnnnnnnnnnnnnnnnnnnnnnnnnnnnnnnnnnnnnnnnnnnnnnnnnnnnnnnnnnnnnnnnnnnnnnnnnnnnnnnnnnnnnnnnnnnnnnnnnnnnnnnnnnnnnnnnnnnnnnnnnnnnnnnnnnnnnnnnnnnnnnnnnnnnnnnnnnnnnnnnnnnnnnnnnnnnnnnnnnnnnnnnnnnnnnnnnnnnnnnnnnnnnnnnnnnnnnnnnnnnnnnnnnnnnnnnnnnnnnnnnnnnnnnnnnnnnnnnnnnnnnnnnnnnnnnnnnnnnnnnnnnnnnnnnnnnnnnnnnnnnnnnnnnnnnnnnnnnnnnnnnnnnnnnnnnnnnnnnnnnnnnnnnnnnnnnnnnnnnnnnnnnnnnnnnnnnnnnnnnnnnnnnnnnnnnnnnnnnnnnnnnnnnnnnnnnnnnnnnnnnnnnnnnnnnnnnnnnnnnnnnnnnnnnnnnnnnnnnnnnnnnnnnnnnnnnnnnnnnnnnnnnnnnnnnnnnnnnnnnnnnnnnnnnnnnnnnnnnnnnnnnnnnnnnnnnnnnnnnnnnnnnnnnnnnnnnnnnnnnnnnnnnnnnnnnnnnnnnnnnnnnnnnnnnnnnnnnnnnnnnnnnnnnnnnnnnnnnnnnnnnnnnnnnnnnnnnnnnnnnnnnnnnnnnnnnnnnnnnnnnnnnnnnnnnnnnnnnnnnnnnnnnnnnnnnnnnnnnnnnnnnnnnnnnnnnnnnnnnnnnnnnnnnnnnnnnnnnnnnnnnnnnnnnnnnnnnnnnnnnnnnnnnnnnnnnnnnnnnnnnnnnnnnnnnnnnnnnnnnnnnnnnnnnnnnnnnnnnnnnnnnnnnnnnnnnnnnnnnnnnnnnnnnnnnnnnnnnnnnnnnnnnnnnnnnnnnnnnnnnnnnnnnnnnnnnnnnnnnnnnnnnnnnnnnnnnnnnnnnnnnnnnnnnnnnnnnnnnnnnnnnnnnnnnnnnnnnnnnnnnnnnnnnnnnnnnnnnnnnnnnnnnnnnnnnnnnnnnnnnnnnnnnnnnnnnnnnnnnnnnnnnnnnnnnnnnnnnnnnnnnnnnnnnnnnnnnnnnnnnnnnnnnnnnnnnnnnnnnnnnnnnnnnnnnnnnnnnnnnnnnnnnnnnnnnnnnnnnnnnnnnnnnnnnnnnnnnnnnnnnnnnnnnnnnnnnnnnnnnnnnnnnnnnnnnnnnnnnnnnnnnnnnnnnnnnnnnnnnnnnnnnnnnnnnnnnnnnnnnnnnnnnnnnnnnnnnnnnnnnnnnnnnnnnnnnnnnnnnnnnnnnnnnnnnnnnnnnnnnnnnnnnnnnnnnnnnnnnnnnnnnnnnnnnnnnnnnnnnnnnnnnnnnnnnnnnnnnnnnnnnnnnnnnnnnnnnnnnnnnnnnnnnnnnnnnnnnnnnnnnnnnnnnnnnnnnnnnnnnnnnnnnnnnnnnnnnnnnnnnnnnnnnnnnnnnnnnnnnnnnnnnnnnnnnnnnnnnnnnnnnnnnnnnnnnnnnnnnnnnnnnnnnnnnnnnnnnnnnnnnnnnnnnnnnnnnnnnnnnnnnnnnnnnnnnnnnnnnnnnnnnnnnnnnnnnnnnnnnnnnnnnnnnnnnnnnnnnnnnnnnnnnnnnnnnnnnnnnnnnnnnnnnnnnnnnnnnnnnnnnnnnnnnnnnnnnnnnnnnnnnnnnnnnnnnnnnnnnnnnnnnnnnnnnnnnnnnnnnnnnnnnnnnnnnnnnnnnnnnnnnnnnnnnnnnnnnnnnnnnnnnnnnnnnnnnnnnnnnnnnnnnnnnnnnnnnnnnnnnnnnnnnnnnnnnnnnnnnnnnnnnnnnnnnnnnnnnnnnnnnnnnnnnnnnnnnnnnnnnnnnnnnnnnnnnnnnnnnnnnnnnnnnnnnnnnnnnnnnnnnnnnnnnnnnnnnnnnnnnnnnnnnnnnnnnnnnnnnnnnnnnnnnnnnnnnnnnnnnnnnnnnnnnnnnnnnnnnnnnnnnnnnnnnnnnnnnnnnnnnnnnnnnnnnnnnnnnnnnnnnnnnnnnnnnnnnnnnnnnnnnnnnnnnnnnnnnnnnnnnnnnnnnnnnnnnnnnnnnnnnnnnnnnnnnnnnnnnnnnnnnnnnnnnnnnnnnnnnnnnnnnnnnnnnnnnnnnnnnnnnnnnnnnnnnnnnnnnnnnnnnnnnnnnnnnnnnnnnnnnnnnnnnnnnnnnnnnnnnnnnnnnnnnnnnnnnnnnnnnnnnnnnnnnnnnnnnnnnnnnnnnnnnnnnnnnnnnnnnnnnnnnnnnnnnnnnnnnnnnnnnnnnnnnnnnnnnnnnnnnnnnnnnnnnnnnnnnnnnnnnnnnnnnnnnnnnnnnnnnnnnnnnnnnnnnnnnnnnnnnnnnnnnnnnnnnnnnnnnnnnnnnnnnnnnnnnnnnnnnnnnnnnnnnnnnnnnnnnnnnnnnnnnnnnnnnnnnnnnnnnnnnnnnnnnnnnnnnnnnnnnnnnnnnnnnnnnnnnnnnnnnnnnnnnnnnnnnnnnnnnnnnnnnnnnnnnnnnnnnnnnnnnnnnnnnnnnnnnnnnnnnnnnnnnnnnnnnnnnnnnnnnnnnnnnnnnnnnnnnnnnnnnnnnnnnnnnnnnnnnnnnnnnnnnnnnnnnnnnnnnnnnnnnnnnnnnnnnnnnnnnnnnnnnnnnnnnnnnnnnnnnnnnnnnnnnnnnnnnnnnnnnnnnnnnnnnnnnnnnnnnnnnnnnnnnnnnnnnnnnnnnnnnnnnnnnnnnnnnnnnnnnnnnnnnnnnnnnnnnnnnnnnnnnnnnnnnnnnnnnnnnnnnnnnnnnnnnnnnnnnnnnnnnnnnnnnnnnnnnnnnnnnnnnnnnnnnnnnnnnnnnnnnnnnnnnnnnnnnnnnnnnnnnnnnnnnnnnnnnnnnnnnnnnnnnnnnnnnnnnnnnnnnnnnnnnnnnnnnnnnnnnnnnnnnnnnnnnnnnnnnnnnnnnnnnnnnnnnnnnnnnnnnnnnnnnnnnnnnnnnnnnnnnnnnnnnnnnnnnnnnnnnnnnnnnnnnnnnnnnnnnnnnnnnnnnnnnnnnnnnnnnnnnnnnnnnnnnnnnnnnnnnnnnnnnnnnnnnnnnnnnnnnnnnnnnnnnnnnnnnnnnnnnnnnnnnnnnnnnnnnnnnnnnnnnnnnnnnnnnnnnnnnnnnnnnnnnnnnnnnnnnnnnnnnnnnnnnnnnnnnnnnnnnnnnnnnnnnnnnnnnnnnnnnnnnnnnnnnnnnnnnnnnnnnnnnnnnnnnnnnnnnnnnnnnnnnnnnnnnnnnnnnnnnnnnnnnnnnnnnnnnnnnnnnnnnnnnnnnnnnnnnnnnnnnnnnnnnnnnnnnnnnnnnnnnnnnnnnnnnnnnnnnnnnnnnnnnnnnnnnnnnnnnnnnnnnnnnnnnnnnnnnnnnnnnnnnnnnnnnnnnnnnnnnnnnnnnnnnnnnnnnnnnnnnnnnnnnnnnnnnnnnnnnnnnnnnnnnnnnnnnnnnnnnnnnnnnnnnnnnnnnnnnnnnnnnnnnnnnnnnnnnnnnnnnnnnnnnnnnnnnnnnnnnnnnnnnnnnnnnnnnnnnnnnnnnnnnnnnnnnnnnnnnnnnnnnnnnnnnnnnnnnnnnnnnnnnnnnnnnnnnnnnnnnnnnnnnnnnnnnnnnnnnnnnnnnnnnnnnnnnnnnnnnnnnnnnnnnnnnnnnnnnnnnnnnnnnnnnnnnnnnnnnnnnnnnnnnnnnnnnnnnnnnnnnnnnnnnnnnnnnnnnnnnnnnnnnnnnnnnnnnnnnnnnnnnnnnnnnnnnnnnnnnnnnnnnnnnnnnnnnnnnnnnnnnnnnnnnnnnnnnnnnnnnnnnnnnnnnnnnnnnnnnnnnnnnnnnnnnnnnnnnnnnnnnnnnnnnnnnnnnnnnnnnnnnnnnnnnnnnnnnnnnnnnnnnnnnnnnnnnnnnnnnnnnnnnnnnnnnnnnnnnnnnnnnnnnnnnnnnnnnnnnnnnnnnnnnnnnnnnnnnnnnnnnnnnnnnnnnnnnnnnnnnnnnnnnnnnnnnnnnnnnnnnnnnnnnnnnnnnnnnnnnnnnnnnnnnnnnnnnnnnnnnnnnnnnnnnnnnnnnnnnnnnnnnnnnnnnnnnnnnnnnnnnnnnnnnnnnnnnnnnnnnnnnnnnnnnnnnnnnnnnnnnnnnnnnnnnnnnnnnnnnnnnnnnnnnnnnnnnnnnnnnnnnnnnnnnnnnnnnnnnnnnnnnnnnnnnnnnnnnnnnnnnnnnnnnnnnnnnnnnnnnnnnnnnnnnnnnnnnnnnnnnnnnnnnnnnnnnnnnnnnnnnnnnnnnnnnnnnnnnnnnnnnnnnnnnnnnnnnnnnnnnnnnnnnnnnnnnnnnnnnnnnnnnnnnnnnnnnnnnnnnnnnnnnnnnnnnnnnnnnnnnnnnnnnnnnnnnnnnnnnnnnnnnnnnnnnnnnnnnnnnnnnnnnnnnnnnnnnnnnnnnnnnnnnnnnnnnnnnnnnnnnnnnnnnnnnnnnnnnnnnnnnnnnnnnnnnnnnnnnnnnnnnnnnnnnnnnnnnnnnnnnnnnnnnnnnnnnnnnnnnnnnnnnnnnnnnnnnnnnnnnnnnnnnnnnnnnnnnnnnnnnnnnnnnnnnnnnnnnnnnnnnnnnnnnnnnnnnnnnnnnnnnnnnnnnnnnnnnnnnnnnnnnnnnnnnnnnnnnnnnnnnnnnnnnnnnnnnnnnnnnnnnnnnnnnnnnnnnnnnnnnnnnnnnnnnnnnnnnnnnnnnnnnnnnnnnnnnnnnnnnnnnnnnnnnnnnnnnnnnnnnnnnnnnnnnnnnnnnnnnnnnnnnnnnnnnnnnnnnnnnnnnnnnnnnnnnnnnnnnnnnnnnnnnnnnnnnnnnnnnnnnnnnnnnnnnnnnnnnnnnnnnnnnnnnnnnnnnnnnnnnnnnnnnnnnnnnnnnnnnnnnnnnnnnnnnnnnnnnnnnnnnnnnnnnnnnnnnnnnnnnnnnnnnnnnnnnnnnnnnnnnnnnnnnnnnnnnnnnnnnnnnnnnnnnnnnnnnnnnnnnnnnnnnnnnnnnnnnnnnnnnnnnnnnnnnnnnnnnnnnnnnnnnnnnnnnnnnnnnnnnnnnnnnnnnnnnnnnnnnnnnnnnnnnnnnnnnnnnnnnnnnnnnnnnnnnnnnnnnnnnnnnnnnnnnnnnnnnnnnnnnnnnnnnnnnnnnnnnnnnnnnnnnnnnnnnnnnnnnnnnnnnnnnnnnnnnnnnnnnnnnnnnnnnnnnnnnnnnnnnnnnnnnnnnnnnnnnnnnnnnnnnnnnnnnnnnnnnnnnnnnnnnnnnnnnnnnnnnnnnnnnnnnnnnnnnnnnnnnnnnnnnnnnnnnnnnnnnnnnnnnnnnnnnnnnnnnnnnnnnnnnnnnnnnnnnnnnnnnnnnnnnnnnnnnnnnnnnnnnnnnnnnnnnnnnnnnnnnnnnnnnnnnnnnnnnnnnnnnnnnnnnnnnnnnnnnnnnnnnnnnnnnnnnnnnnnnnnnnnnnnnnnnnnnnnnnnnnnnnnnnnnnnnnnnnnnnnnnnnnnnnnnnnnnnnnnnnnnnnnnnnnnnnnnnnnnnnnnnnnnnnnnnnnnnnnnnnnnnnnnnnnnnnnnnnnnnnnnnnnnnnnnnnnnnnnnnnnnnnnnnnnnnnnnnnnnnnnnnnnnnnnnnnnnnnnnnnnnnnnnnnnnnnnnnnnnnnnnnnnnnnnnnnnnnnnnnnnnnnnnnnnnnnnnnnnnnnnnnnnnnnnnnnnnnnnnnnnnnnnnnnnnnnnnnnnnnnnnnnnnnnnnnnnnnnnnnnnnnnnnnnnnnnnnnnnnnnnnnnnnnnnnnnnnnnnnnnnnnnnnnnnnnnnnnnnnnnnnnnnnnnnnnnnnnnnnnnnnnnnnnnnnnnnnnnnnnnnnnnnnnnnnnnnnnnnnnnnnnnnnnnnnnnnnnnnnnnnnnnnnnnnnnnnnnnnnnnnnnnnnnnnnnnnnnnnnnnnnnnnnnnnnnnnnnnnnnnnnnnnnnnnnnnnnnnnnnnnnnnnnnnnnnnnnnnnnnnnnnnnnnnnnnnnnnnnnnnnnnnnnnnnnnnnnnnnnnnnnnnnnnnnnnnnnnnnnnnnnnnnnnnnnnnnnnnnnnnnnnnnnnnnnnnnnnnnnnnnnnnnnnnnnnnnnnnnnnnnnnnnnnnnnnnnnnnnnnnnnnnnnnnnnnnnnnnnnnnnnnnnnnnnnnnnnnnnnnnnnnnnnnnnnnnnnnnnnnnnnnnnnnnnnnnnnnnnnnnnnnnnnnnnnnnnnnnnnnnnnnnnnnnnnnnnnnnnnnnnnnnnnnnnnnnnnnnnnnnnnnnnnnnnnnnnnnnnnnnnnnnnnnnnnnnnnnnnnnnnnnnnnnnnnnnnnnnnnnnnnnnnnnnnnnnnnnnnnnnnnnnnnnnnnnnnnnnnnnnnnnnnnnnnnnnnnnnnnnnnnnnnnnnnnnnnnnnnnnnnnnnnnnnnnnnnnnnnnnnnnnnnnnnnnnnnnnnnnnnnnnnnnnnnnnnnnnnnnnnnnnnnnnnnnnnnnnnnnnnnnnnnnnnnnnnnnnnnnnnnnnnnnnnnnnnnnnnnnnnnnnnnnnnnnnnnnnnnnnnnnnnnnnnnnnnnnnnnnnnnnnnnnnnnnnnnnnnnnnnnnnnnnnnnnnnnnnnnnnnnnnnnnnnnnnnnnnnnnnnnnnnnnnnnnnnnnnnnnnnnnnnnnnnnnnnnnnnnnnnnnnnnnnnnnnnnnnnnnnnnnnnnnnnnnnnnnnnnnnnnnnnnnnnnnnnnnnnnnnnnnnnnnnnnnnnnnnnnnnnnnnnnnnnnnnnnnnnnnnnnnnnnnnnnnnnnnnnnnnnnnnnnnnnnnnnnnnnnnnnnnnnnnnnnnnnnnnnnnnnnnnnnnnnnnnnnnnnnnnnnnnnnnnnnnnnnnnnnnnnnnnnnnnnnnnnnnnnnnnnnnnnnnnnnnnnnnnnnnnnnnnnnnnnnnnnnnnnnnnnnnnnnnnnnnnnnnnnnnnnnnnnnnnnnnnnnnnnnnnnnnnnnnnnnnnnnnnnnnnnnnnnnnnnnnnnnnnnnnnnnnnnnnnnnnnnnnnnnnnnnnnnnnnnnnnnnnnnnnnnnnnnnnnnnnnnnnnnnnnnnnnnnnnnnnnnnnnnnnnnnnnnnnnnnnnnnnnnnnnnnnnnnnnnnnnnnnnnnnnnnnnnnnnnnnnnnnnnnnnnnnnnnnnnnnnnnnnnnnnnnnnnnnnnnnnnnnnnnnnnnnnnnnnnnnnnnnnnnnnnnnnnnnnnnnnnnnnnnnnnnnnnnnnnnnnnnnnnnnnnnnnnnnnnnnnnnnnnnnnnnnnnnnnnnnnnnnnnnnnnnnnnnnnnnnnnnnnnnnnnnnnnnnnnnnnnnnnnnnnnnnnnnnnnnnnnnnnnnnnnnnnnnnnnnnnnnnnnnnnnnnnnnnnnnnnnnnnnnnnnnnnnnnnnnnnnnnnnnnnnnnnnnnnnnnnnnnnnnnnnnnnnnnnnnnnnnnnnnnnnnnnnnnnnnnnnnnnnnnnnnnnnnnnnnnnnnnnnnnnnnnnnnnnnnnnnnnnnnnnnnnnnnnnnnnnnnnnnnnnnnnnnnnnnnnnnnnnnnnnnnnnnnnnnnnnnnnnnnnnnnnnnnnnnnnnnnnnnnnnnnnnnnnnnnnnnnnnnnnnnnnnnnnnnnnnnnnnnnnnnnnnnnnnnnnnnnnnnnnnnnnnnnnnnnnnnnnnnnnnnnnnnnnnnnnnnnnnnnnnnnnnnnnnnnnnnnnnnnnnnnnnnnnnnnnnnnnnnnnnnnnnnnnnnnnnnnnnnnnnnnnnnnnnnnnnnnnnnnnnnnnnnnnnnnnnnnnnnnnnnnnnnnnnnnnnnnnnnnnnnnnnnnnnnnnnnnnnnnnnnnnnnnnnnnnnnnnnnnnnnnnnnnnnnnnnnnnnnnnnnnnnnnnnnnnnnnnnnnnnnnnnnnnnnnnnnnnnnnnnnnnnnnnnnnnnnnnnnnnnnnnnnnnnnnnnnnnnnnnnnnnnnnnnnnnnnnnnnnnnnnnnnnnnnnnnnnnnnnnnnnnnnnnnnnnnnnnnnnnnnnnnnnnnnnnnnnnnnnnnnnnnnnnnnnnnnnnnnnnnnnnnnnnnnnnnnnnnnnnnnnnnnnnnnnnnnnnnnnnnnnnnnnnnnnnnnnnnnnnnnnnnnnnnnnnnnnnnnnnnnnnnnnnnnnnnnnnnnnnnnnnnnnnnnnnnnnnnnnnnnnnnnnnnnnnnnnnnnnnnnnnnnnnnnnnnnnnnnnnnnnnnnnnnnnnnnnnnnnnnnnnnnnnnnnnnnnnnnnnnnnnnnnnnnnnnnnnnnnnnnnnnnnnnnnnnnnnnnnnnnnnnnnnnnnnnnnnnnnnnnnnnnnnnnnnnnnnnnnnnnnnnnnnnnnnnnnnnnnnnnnnnnnnnnnnnnnnnnnnnnnnnnnnnnnnnnnnnnnnnnnnnnnnnnnnnnnnnnnnnnnnnnnnnnnnnnnnnnnnnnnnnnnnnnnnnnnnnnnnnnnnnnnnnnnnnnnnnnnnnnnnnnnnnnnnnnnnnnnnnnnnnnnnnnnnnnnnnnnnnnnnnnnnnnnnnnnnnnnnnnnnnnnnnnnnnnnnnnnnnnnnnnnnnnnnnnnnnnnnnnnnnnnnnnnnnnnnnnnnnnnnnnnnnnnnnnnnnnnnnnnnnnnnnnnnnnnnnnnnnnnnnnnnnnnnnnnnnnnnnnnnnnnnnnnnnnnnnnnnnnnnnnnnnnnnnnnnnnnnnnnnnnnnnnnnnnnnnnnnnnnnnnnnnnnnnnnnnnnnnnnnnnnnnnnnnnnnnnnnnnnnnnnnnnnnnnnnnnnnnnnnnnnnnnnnnnnnnnnnnnnnnnnnnnnnnnnnnnnnnnnnnnnnnnnnnnnnnnnnnnnnnnnnnnnnnnnnnnnnnnnnnnnnnnnnnnnnnnnnnnnnnnnnnnnnnnnnnnnnnnnnnnnnnnnnnnnnnnnnnnnnnnnnnnnnnnnnnnnnnnnnnnnnnnnnnnnnnnnnnnnnnnnnnnnnnnnnnnnnnnnnnnnnnnnnnnnnnnnnnnnnnnnnnnnnnnnnnnnnnnnnnnnnnnnnnnnnnnnnnnnnnnnnnnnnnnnnnnnnnnnnnnnnnnnnnnnnnnnnnnnnnnnnnnnnnnnnnnnnnnnnnnnnnnnnnnnnnnnnnnnnnnnnnnnnnnnnnnnnnnnnnnnnnnnnnnnnnnnnnnnnnnnnnnnnnnnnnnnnnnnnnnnnnnnnnnnnnnnnnnnnnnnnnnnnnnnnnnnnnnnnnnnnnnnnnnnnnnnnnnnnnnnnnnnnnnnnnnnnnnnnnnnnnnnnnnnnnnnnnnnnnnnnnnnnnnnnnnnnnnnnnnnnnnnnnnnnnnnnnnnnnnnnnnnnnnnnnnnnnnnnnnnnnnnnnnnnnnnnnnnnnnnnnnnnnnnnnnnnnnnnnnnnnnnnnnnnnnnnnnnnnnnnnnnnnnnnnnnnnnnnnnnnnnnnnnnnnnnnnnnnnnnnnnnnnnnnnnnnnnnnnnnnnnnnnnnnnnnnnnnnnnnnnnnnnnnnnnnnnnnnnnnnnnnnnnnnnnnnnnnnnnnnnnnnnnnnnnnnnnnnnnnnnnnnnnnnnnnnnnnnnnnnnnnnnnnnnnnnnnnnnnnnnnnnnnnnnnnnnnnnnnnnnnnnnnnnnnnnnnnnnnnnnnnnnnnnnnnnnnnnnnnnnnnnnnnnnnnnnnnnnnnnnnnnnnnnnnnnnnnnnnnnnnnnnnnnnnnnnnnnnnnnnnnnnnnnnnnnnnnnnnnnnnnnnnnnnnnnnnnnnnnnnnnnnnnnnnnnnnnnnnnnnnnnnnnnnnnnnnnnnnnnnnnnnnnnnnnnnnnnnnnnnnnnnnnnnnnnnnnnnnnnnnnnnnnnnnnnnnnnnnnnnnnnnnnnnnnnnnnnnnnnnnnnnnnnnnnnnnnnnnnnnnnnnnnnnnnnnnnnnnnnnnnnnnnnnnnnnnnnnnnnnnnnnnnnnnnnnnnnnnnnnnnnnnnnnnnnnnnnnnnnnnnnnnnnnnnnnnnnnnnnnnnnnnnnnnnnnnnnnnnnnnnnnnnnnnnnnnnnnnnnnnnnnnnnnnnnnnnnnnnnnnnnnnnnnnnnnnnnnnnnnnnnnnnnnnnnnnnnnnnnnnnnnnnnnnnnnnnnnnnnnnnnnnnnnnnnnnnnnnnnnnnnnnnnnnnnnnnnnnnnnnnnnnnnnnnnnnnnnnnnnnnnnnnnnnnnnnnnnnnnnnnnnnnnnnnnnnnnnnnnnnnnnnnnnnnnnnnnnnnnnnnnnnnnnnnnnnnnnnnnnnnnnnnnnnnnnnnnnnnnnnnnnnnnnnnnnnnnnnnnnnnnnnnnnnnnnnnnnnnnnnnnnnnnnnnnnnnnnnnnnnnnnnnnnnnnnnnnnnnnnnnnnnnnnnnnnnnnnnnnnnnnnnnnnnnnnnnnnnnnnnnnnnnnnnnnnnnnnnnnnnnnnnnnnnnnnnnnnnnnnnnnnnnnnnnnnnnnnnnnnnnnnnnnnnnnnnnnnnnnnnnnnnnnnnnnnnnnnnnnnnnnnnnnnnnnnnnnnnnnnnnnnnnnnnnnnnnnnnnnnnnnnnnnnnnnnnnnnnnnnnnnnnnnnnnnnnnnnnnnnnnnnnnnnnnnnnnnnnnnnnnnnnnnnnnnnnnnnnnnnnnnnnnnnnnnnnnnnnnnnnnnnnnnnnnnnnnnnnnnnnnnnnnnnnnnnnnnnnnnnnnnnnnnnnnnnnnnnnnnnnnnnnnnnnnnnnnnnnnnnnnnnnnnnnnnnnnnnnnnnnnnnnnnnnnnnnnnnnnnnnnnnnnnnnnnnnnnnnnnnnnnnnnnnnnnnnnnnnnnnnnnnnnnnnnnnnnnnnnnnnnnnnnnnnnnnnnnnnnnnnnnnnnnnnnnnnnnnnnnnnnnnnnnnnnnnnnnnnnnnnnnnnnnnnnnnnnnnnnnnnnnnnnnnnnnnnnnnnnnnnnnnnnnnnnnnnnnnnnnnnnnnnnnnnnnnnnnnnnnnnnnnnnnnnnnnnnnnnnnnnnnnnnnnnnnnnnnnnnnnnnnnnnnnnnnnnnnnnnnnnnnnnnnnnnnnnnnnnnnnnnnnnnnnnnnnnnnnnnnnnnnnnnnnnnnnnnnnnnnnnnnnnnnnnnnnnnnnnnnnnnnnnnnnnnnnnnnnnnnnnnnnnnnnnnnnnnnnnnnnnnnnnnnnnnnnnnnnnnnnnnnnnnnnnnnnnnnnnnnnnnnnnnnnnnnnnnnnnnnnnnnnnnnnnnnnnnnnnnnnnnnnnnnnnnnnnnnnnnnnnnnnnnnnnnnnnnnnnnnnnnnnnnnnnnnnnnnnnnnnnnnnnnnnnnnnnnnnnnnnnnnnnnnnnnnnnnnnnnnnnnnnnnnnnnnnnnnnnnnnnnnnnnnnnnnnnnnnnnnnnnnnnnnnnnnnnnnnnnnnnnnnnnnnnnnnnnnnnnnnnnnnnnnnnnnnnnnnnnnnnnnnnnnnnnnnnnnnnnnnnnnnnnnnnnnnnnnnnnnnnnnnnnnnnnnnnnnnnnnnnnnnnnnnnnnnnnnnnnnnnnnnnnnnnnnnnnnnnnnnnnnnnnnnnnnnnnnnnnnnnnnnnnnnnnnnnnnnnnnnnnnnnnnnnnnnnnnnnnnnnnnnnnnnnnnnnnnnnnnnnnnnnnnnnnnnnnnnnnnnnnnnnnnnnnnnnnnnnnnnnnnnnnnnnnnnnnnnnnnnnnnnnnnnnnnnnnnnnnnnnnnnnnnnnnnnnnnnnnnnnnnnnnnnnnnnnnnnnnnnnnnnnnnnnnnnnnnnnnnnnnnnnnnnnnnnnnnnnnnnnnnnnnnnnnnnnnnnnnnnnnnnnnnnnnnnnnnnnnnnnnnnnnnnnnnnnnnnnnnnnnnnnnnnnnnnnnnnnnnnnnnnnnnnnnnnnnnnnnnnnnnnnnnnnnnnnnnnnnnnnnnnnnnnnnnnnnnnnnnnnnnnnnnnnnnnnnnnnnnnnnnnnnnnnnnnnnnnnnnnnnnnnnnnnnnnnnnnnnnnnnnnnnnnnnnnnnnnnnnnnnnnnnnnnnnnnnnnnnnnnnnnnnnnnnnnnnnnnnnnnnnnnnnnnnnnnnnnnnnnnnnnnnnnnnnnnnnnnnnnnnnnnnnnnnnnnnnnnnnnnnnnnnnnnnnnnnnnnnnnnnnnnnnnnnnnnnnnnnnnnnnnnnnnnnnnnnnnnnnnnnnnnnnnnnnnnnnnnnnnnnnnnnnnnnnnnnnnnnnnnnnnnnnnnnnnnnnnnnnnnnnnnnnnnnnnnnnnnnnnnnnnnnnnnnnnnnnnnnnnnnnnnnnnnnnnnnnnnnnnnnnnnnnnnnnnnnnnnnnnnnnnnnnnnnnnnnnnnnnnnnnnnnnnnnnnnnnnnnnnnnnnnnnnnnnnnnnnnnnnnnnnnnnnnnnnnnnnnnnnnnnnnnnnnnnnnnnnnnnnnnnnnnnnnnnnnnnnnnnnnnnnnnnnnnnnnnnnnnnnnnnnnnnnnnnnnnnnnnnnnnnnnnnnnnnnnnnnnnnnnnnnnnnnnnnnnnnnnnnnnnnnnnnnnnnnnnnnnnnnnnnnnnnnnnnnnnnnnnnnnnnnnnnnnnnnnnnnnnnnnnnnnnnnnnnnnnnnnnnnnnnnnnnnnnnnnnnnnnnnnnnnnnnnnnnnnnnnnnnnnnnnnnnnnnnnnnnnnnnnnnnnnnnnnnnnnnnnnnnnnnnnnnnnnnnnnnnnnnnnnnnnnnnnnnnnnnnnnnnnnnnnnnnnnnnnnnnnnnnnnnnnnnnnnnnnnnnnnnnnnnnnnnnnnnnnnnnnnnnnnnnnnnnnnnnnnnnnnnnnnnnnnnnnnnnnnnnnnnnnnnnnnnnnnnnnnnnnnnnnnnnnnnnnnnnnnnnnnnnnnnnnnnnnnnnnnnnnnnnnnnnnnnnnnnnnnnnnnnnnnnnnnnnnnnnnnnnnnnnnnnnnnnnnnnnnnnnnnnnnnnnnnnnnnnnnnnnnnnnnnnnnnnnnnnnnnnnnnnnnnnnnnnnnnnnnnnnnnnnnnnnnnnnnnnnnnnnnnnnnnnnnnnnnnnnnnnnnnnnnnnnnnnnnnnnnnnnnnnnnnnnnnnnnnnnnnnnnnnnnnnnnnnnnnnnnnnnnnnnnnnnnnnnnnnnnnnnnnnnnnnnnnnnnnnnnnnnnnnnnnnnnnnnnnnnnnnnnnnnnnnnnnnnnnnnnnnnnnnnnnnnnnnnnnnnnnnnnnnnnnnnnnnnnnnnnnnnnnnnnnnnnnnnnnnnnnnnnnnnnnnnnnnnnnnnnnnnnnnnnnnnnnnnnnnnnnnnnnnnnnnnnnnnnnnnnnnnnnnnnnnnnnnnnnnnnnnnnnnnnnnnnnnnnnnnnnnnnnnnnnnnnnnnnnnnnnnnnnnnnnnnnnnnnnnnnnnnnnnnnnnnnnnnnnnnnnnnnnnnnnnnnnnnnnnnnnnnnnnnnnnnnnnnnnnnnnnnnnnnnnnnnnnnnnnnnnnnnnnnnnnnnnnnnnnnnnnnnnnnnnnnnnnnnnnnnnnnnnnnnnnnnnnnnnnnnnnnnnnnnnnnnnnnnnnnnnnnnnnnnnnnnnnnnnnnnnnnnnnnnnnnnnnnnnnnnnnnnnnnnnnnnnnnnnnnnnnnnnnnnnnnnnnnnnnnnnnnnnnnnnnnnnnnnnnnnnnnnnnnnnnnnnnnnnnnnnnnnnnnnnnnnnnnnnnnnnnnnnnnnnnnnnnnnnnnnnnnnnnnnnnnnnnnnnnnnnnnnnnnnnnnnnnnnnnnnnnnnnnnnnnnnnnnnnnnnnnnnnnnnnnnnnnnnnnnnnnnnnnnnnnnnnnnnnnnnnnnnnnnnnnnnnnnnnnnnnnnnnnnnnnnnnnnnnnnnnnnnnnnnnnnnnnnnnnnnnnnnnnnnnnnnnnnnnnnnnnnnnnnnnnnnnnnnnnnnnnnnnnnnnnnnnnnnnnnnnnnnnnnnnnnnnnnnnnnnnnnnnnnnnnnnnnnnnnnnnnnnnnnnnnnnnnnnnnnnnnnnnnnnnnnnnnnnnnnnnnnnnnnnnnnnnnnnnnnnnnnnnnnnnnnnnnnnnnnnnnnnnnnnnnnnnnnnnnnnnnnnnnnnnnnnnnnnnnnnnnnnnnnnnnnnnnnnnnnnnnnnnnnnnnnnnnnnnnnnnnnnnnnnnnnnnnnnnnnnnnnnnnnnnnnnnnnnnnnnnnnnnnnnnnnnnnnnnnnnnnnnnnnnnnnnnnnnnnnnnnnnnnnnnnnnnnnnnnnnnnnnnnnnnnnnnnnnnnnnnnnnnnnnnnnnnnnnnnnnnnnnnnnnnnnnnnnnnnnnnnnnnnnnnnnnnnnnnnnnnnnnnnnnnnnnnnnnnnnnnnnnnnnnnnnnnnnnnnnnnnnnnnnnnnnnnnnnnnnnnnnnnnnnnnnnnnnnnnnnnnnnnnnnnnnnnnnnnnnnnnnnnnnnnnnnnnnnnnnnnnnnnnnnnnnnnnnnnnnnnnnnnnnnnnnnnnnnnnnnnnnnnnnnnnnnnnnnnnnnnnnnnnnnnnnnnnnnnnnnnnnnnnnnnnnnnnnnnnnnnnnnnnnnnnnnnnnnnnnnnnnnnnnnnnnnnnnnnnnnnnnnnnnnnnnnnnnnnnnnnnnnnnnnnnnnnnnnnnnnnnnnnnnnnnnnnnnnnnnnnnnnnnnnnnnnnnnnnnnnnnnnnnnnnnnnnnnnnnnnnnnnnnnnnnnnnnnnnnnnnnnnnnnnnnnnnnnnnnnnnnnnnnnnnnnnnnnnnnnnnnnnnnnnnnnnnnnnnnnnnnnnnnnnnnnnnnnnnnnnnnnnnnnnnnnnnnnnnnnnnnnnnnnnnnnnnnnnnnnnnnnnnnnnnnnnnnnnnnnnnnnnnnnnnnnnnnnnnnnnnnnnnnnnnnnnnnnnnnnnnnnnnnnnnnnnnnnnnnnnnnnnnnnnnnnnnnnnnnnnnnnnnnnnnnnnnnnnnnnnnnnnnnnnnnnnnnnnnnnnnnnnnnnnnnnnnnnnnnnnnnnnnnnnnnnnnnnnnnnnnnnnnnnnnnnnnnnnnnnnnnnnnnnnnnnnnnnnnnnnnnnnnnnnnnnnnnnnnnnnnnnnnnnnnnnnnnnnnnnnnnnnnnnnnnnnnnnnnnnnnnnnnnnnnnnnnnnnnnnnnnnnnnnnnnnnnnnnnnnnnnnnnnnnnnnnnnnnnnnnnnnnnnnnnnnnnnnnnnnnnnnnnnnnnnnnnnnnnnnnnnnnnnnnnnnnnnnnnnnnnnnnnnnnnnnnnnnnnnnnnnnnnnnnnnnnnnnnnnnnnnnnnnnnnnnnnnnnnnnnnnnnnnnnnnnnnnnnnnnnnnnnnnnnnnnnnnnnnnnnnnnnnnnnnnnnnnnnnnnnnnnnnnnnnnnnnnnnnnnnnnnnnnnnnnnnnnnnnnnnnnnnnnnnnnnnnnnnnnnnnnnnnnnnnnnnnnnnnnnnnnnnnnnnnnnnnnnnnnnnnnnnnnnnnnnnnnnnnnnnnnnnnnnnnnnnnnnnnnnnnnnnnnnnnnnnnnnnnnnnnnnnnnnnnnnnnnnnnnnnnnnnnnnnnnnnnnnnnnnnnnnnnnnnnnnnnnnnnnnnnnnnnnnnnnnnnnnnnnnnnnnnnnnnnnnnnnnnnnnnnnnnnnnnnnnnnnnnnnnnnnnnnnnnnnnnnnnnnnnnnnnnnnnnnnnnnnnnnnnnnnnnnnnnnnnnnnnnnnnnnnnnnnnnnnnnnnnnnnnnnnnnnnnnnnnnnnnnnnnnnnnnnnnnnnnnnnnnnnnnnnnnnnnnnnnnnnnnnnnnnnnnnnnnnnnnnnnnnnnnnnnnnnnnnnnnnnnnnnnnnnnnnnnnnnnnnnnnnnnnnnnnnnnnnnnnnnnnnnnnnnnnnnnnnnnnnnnnnnnnnnnnnnnnnnnnnnnnnnnnnnnnnnnnnnnnnnnnnnnnnnnnnnnnnnnnnnnnnnnnnnnnnnnnnnnnnnnnnnnnnnnnnnnnnnnnnnnnnnnnnnnnnnnnnnnnnnnnnnnnnnnnnnnnnnnnnnnnnnnnnnnnnnnnnnnnnnnnnnnnnnnnnnnnnnnnnnnnnnnnnnnnnnnnnnnnnnnnnnnnnnnnnnnnnnnnnnnnnnnnnnnnnnnnnnnnnnnnnnnnnnnnnnnnnnnnnnnnnnnnnnnnnnnnnnnnnnnnnnnnnnnnnnnnnnnnnnnnnnnnnnnnnnnnnnnnnnnnnnnnnnnnnnnnnnnnnnnnnnnnnnnnnnnnnnnnnnnnnnnnnnnnnnnnnnnnnnnnnnnnnnnnnnnnnnnnnnnnnnnnnnnnnnnnnnnnnnnnnnnnnnnnnnnnnnnnnnnnnnnnnnnnnnnnnnnnnnnnnnnnnnnnnnnnnnnnnnnnnnnnnnnnnnnnnnnnnnnnnnnnnnnnnnnnnnnnnnnnnnnnnnnnnnnnnnnnnnnnnnnnnnnnnnnnnnnnnnnnnnnnnnnnnnnnnnnnnnnnnnnnnnnnnnnnnnnnnnnnnnnnnnnnnnnnnnnnnnnnnnnnnnnnnnnnnnnnnnnnnnnnnnnnnnnnnnnnnnnnnnnnnnnnnnnnnnnnnnnnnnnnnnnnnnnnnnnnnnnnnnnnnnnnnnnnnnnnnnnnnnnnnnnnnnnnnnnnnnnnnnnnnnnnnnnnnnnnnnnnnnnnnnnnnnnnnnnnnnnnnnnnnnnnnnnnnnnnnnnnnnnnnnnnnnnnnnnnnnnnnnnnnnnnnnnnnnnnnnnnnnnnnnnnnnnnnnnnnnnnnnnnnnnnnnnnnnnnnnnnnnnnnnnnnnnnnnnnnnnnnnnnnnnnnnnnnnnnnnnnnnnnnnnnnnnnnnnnnnnnnnnnnnnnnnnnnnnnnnnnnnnnnnnnnnnnnnnnnnnnnnnnnnnnnnnnnnnnnnnnnnnnnnnnnnnnnnnnnnnnnnnnnnnnnnnnnnnnnnnnnnnnnnnnnnnnnnnnnnnnnnnnnnnnnnnnnnnnnnnnnnnnnnnnnnnnnnnnnnnnnnnnnnnnnnnnnnnnnnnnnnnnnnnnnnnnnnnnnnnnnnnnnnnnnnnnnnnnnnnnnnnnnnnnnnnnnnnnnnnnnnnnnnnnnnnnnnnnnnnnnnnnnnnnnnnnnnnnnnnnnnnnnnnnnnnnnnnnnnnnnnnnnnnnnnnnnnnnnnnnnnnnnnnnnnnnnnnnnnnnnnnnnnnnnnnnnnnnnnnnnnnnnnnnnnnnnnnnnnnnnnnnnnnnnnnnnnnnnnnnnnnnnnnnnnnnnnnnnnnnnnnnnnnnnnnnnnnnnnnnnnnnnnnnnnnnnnnnnnnnnnnnnnnnnnnnnnnnnnnnnnnnnnnnnnnnnnnnnnnnnnnnnnnnnnnnnnnnnnnnnnnnnnnnnnnnnnnnnnnnnnnnnnnnnnnnnnnnnnnnnnnnnnnnnnnnnnnnnnnnnnnnnnnnnnnnnnnnnnnnnnnnnnnnnnnnnnnnnnnnnnnnnnnnnnnnnnnnnnnnnnnnnnnnnnnnnnnnnnnnnnnnnnnnnnnnnnnnnnnnnnnnnnnnnnnnnnnnnnnnnnnnnnnnnnnnnnnnnnnnnnnnnnnnnnnnnnnnnnnnnnnnnnnnnnnnnnnnnnnnnnnnnnnnnnnnnnnnnnnnnnnnnnnnnnnnnnnnnnnnnnnnnnnnnnnnnnnnnnnnnnnnnnnnnnnnnnnnnnnnnnnnnnnnnnnnnnnnnnnnnnnnnnnnnnnnnnnnnnnnnnnnnnnnnnnnnnnnnnnnnnnnnnnnnnnnnnnnnnnnnnnnnnnnnnnnnnnnnnnnnnnnnnnnnnnnnnnnnnnnnnnnnnnnnnnnnnnnnnnnnnnnnnnnnnnnnnnnnnnnnnnnnnnnnnnnnnnnnnnnnnnnnnnnnnnnnnnnnnnnnnnnnnnnnnnnnnnnnnnnnnnnnnnnnnnnnnnnnnnnnnnnnnnnnnnnnnnnnnnnnnnnnnnnnnnnnnnnnnnnnnnnnnnnnnnnnnnnnnnnnnnnnnnnnnnnnnnnnnnnnnnnnnnnnnnnnnnnnnnnnnnnnnnnnnnnnnnnnnnnnnnnnnnnnnnnnnnnnnnnnnnnnnnnnnnnnnnnnnnnnnnnnnnnnnnnnnnnnnnnnnnnnnnnnnnnnnnnnnnnnnnnnnnnnnnnnnnnnnnnnnnnnnnnnnnnnnnnnnnnnnnnnnnnnnnnnnnnnnnnnnnnnnnnnnnnnnnnnnnnnnnnnnnnnnnnnnnnnnnnnnnnnnnnnnnnnnnnnnnnnnnnnnnnnnnnnnnnnnnnnnnnnnnnnnnnnnnnnnnnnnnnnnnnnnnnnnnnnnnnnnnnnnnnnnnnnnnnnnnnnnnnnnnnnnnnnnnnnnnnnnnnnnnnnnnnnnnnnnnnnnnnnnnnnnnnnnnnnnnnnnnnnnnnnnnnnnnnnnnnnnnnnnnnnnnnnnnnnnnnnnnnnnnnnnnnnnnnnnnnnnnnnnnnnnnnnnnnnnnnnnnnnnnnnnnnnnnnnnnnnnnnnnnnnnnnnnnnnnnnnnnnnnnnnnnnnnnnnnnnnnnnnnnnnnnnnnnnnnnnnnnnnnnnnnnnnnnnnnnnnnnnnnnnnnnnnnnnnnnnnnnnnnnnnnnnnnnnnnnnnnnnnnnnnnnnnnnnnnnnnnnnnnnnnnnnnnnnnnnnnnnnnnnnnnnnnnnnnnnnnnnnnnnnnnnnnnnnnnnnnnnnnnnnnnnnnnnnnnnnnnnnnnnnnnnnnnnnnnnnnnnnnnnnnnnnnnnnnnnnnnnnnnnnnnnnnnnnnnnnnnnnnnnnnnnnnnnnnnnnnnnnnnnnnnnnnnnnnnnnnnnnnnnnnnnnnnnnnnnnnnnnnnnnnnnnnnnnnnnnnnnnnnnnnnnnnnnnnnnnnnnnnnnnnnnnnnnnnnnnnnnnnnnnnnnnnnnnnnnnnnnnnnnnnnnnnnnnnnnnnnnnnnnnnnnnnnnnnnnnnnnnnnnnnnnnnnnnnnnnnnnnnnnnnnnnnnnnnnnnnnnnnnnnnnnnnnnnnnnnnnnnnnnnnnnnnnnnnnnnnnnnnnnnnnnnnnnnnnnnnnnnnnnnnnnnnnnnnnnnnnnnnnnnnnnnnnnnnnnnnnnnnnnnnnnnnnnnnnnnnnnnnnnnnnnnnnnnnnnnnnnnnnnnnnnnnnnnnnnnnnnnnnnnnnnnnnnnnnnnnnnnnnnnnnnnnnnnnnnnnnnnnnnnnnnnnnnnnnnnnnnnnnnnnnnnnnnnnnnnnnnnnnnnnnnnnnnnnnnnnnnnnnnnnnnnnnnnnnnnnnnnnnnnnnnnnnnnnnnnnnnnnnnnnnnnnnnnnnnnnnnnnnnnnnnnnnnnnnnnnnnnnnnnnnnnnnnnnnnnnnnnnnnnnnnnnnnnnnnnnnnnnnnnnnnnnnnnnnnnnnnnnnnnnnnnnnnnnnnnnnnnnnnnnnnnnnnnnnnnnnnnnnnnnnnnnnnnnnnnnnnnnnnnnnnnnnnnnnnnnnnnnnnnnnnnnnnnnnnnnnnnnnnnnnnnnnnnnnnnnnnnnnnnnnnnnnnnnnnnnnnnnnnnnnnnnnnnnnnnnnnnnnnnnnnnnnnnnnnnnnnnnnnnnnnnnnnnnnnnnnnnnnnnnnnnnnnnnnnnnnnnnnnnnnnnnnnnnnnnnnnnnnnnnnnnnnnnnnnnnnnnnnnnnnnnnnnnnnnnnnnnnnnnnnnnnnnnnnnnnnnnnnnnnnnnnnnnnnnnnnnnnnnnnnnnnnnnnnnnnnnnnnnnnnnnnnnnnnnnnnnnnnnnnnnnnnnnnnnnnnnnnnnnnnnnnnnnnnnnnnnnnnnnnnnnnnnnnnnnnnnnnnnnnnnnnnnnnnnnnnnnnnnnnnnnnnnnnnnnnnnnnnnnnnnnnnnnnnnnnnnnnnnnnnnnnnnnnnnnnnnnnnnnnnnnnnnnnnnnnnnnnnnnnnnnnnnnnnnnnnnnnnnnnnnnnnnnnnnnnnnnnnnnnnnnnnnnnnnnnnnnnnnnnnnnnnnnnnnnnnnnnnnnnnnnnnnnnnnnnnnnnnnnnnnnnnnnnnnnnnnnnnnnnnnnnnnnnnnnnnnnnnnnnnnnnnnnnnnnnnnnnnnnnnnnnnnnnnnnnnnnnnnnnnnnnnnnnnnnnnnnnnnnnnnnnnnnnnnnnnnnnnnnnnnnnnnnnnnnnnnnnnnnnnnnnnnnnnnnnnnnnnnnnnnnnnnnnnnnnnnnnnnnnnnnnnnnnnnnnnnnnnnnnnnnnnnnnnnnnnnnnnnnnnnnnnnnnnnnnnnnnnnnnnnnnnnnnnnnnnnnnnnnnnnnnnnnnnnnnnnnnnnnnnnnnnnnnnnnnnnnnnnnnnnnnnnnnnnnnnnnnnnnnnnnnnnnnnnnnnnnnnnnnnnnnnnnnnnnnnnnnnnnnnnnnnnnnnnnnnnnnnnnnnnnnnnnnnnnnnnnnnnnnnnnnnnnnnnnnnnnnnnnnnnnnnnnnnnnnnnnnnnnnnnnnnnnnnnnnnnnnnnnnnnnnnnnnnnnnnnnnnnnnnnnnnnnnnnnnnnnnnnnnnnnnnnnnnnnnnnnnnnnnnnnnnnnnnnnnnnnnnnnnnnnnnnnnnnnnnnnnnnnnnnnnnnnnnnnnnnnnnnnnnnnnnnnnnnnnnnnnnnnnnnnnnnnnnnnnnnnnnnnnnnnnnnnnnnnnnnnnnnnnnnnnnnnnnnnnnnnnnnnnnnnnnnnnnnnnnnnnnnnnnnnnnnnnnnnnnnnnnnnnnnnnnnnnnnnnnnnnnnnnnnnnnnnnnnnnnnnnnnnnnnnnnnnnnnnnnnnnnnnnnnnnnnnnnnnnnnnnnnnnnnnnnnnnnnnnnnnnnnnnnnnnnnnnnnnnnnnnnnnnnnnnnnnnnnnnnnnnnnnnnnnnnnnnnnnnnnnnnnnnnnnnnnnnnnnnnnnnnnnnnnnnnnnnnnnnnnnnnnnnnnnnnnnnnnnnnnnnnnnnnnnnnnnnnnnnnnnnnnnnnnnnnnnnnnnnnnnnnnnnnnnnnnnnnnnnnnnnnnnnnnnnnnnnnnnnnnnnnnnnnnnnnnnnnnnnnnnnnnnnnnnnnnnnnnnnnnnnnnnnnnnnnnnnnnnnnnnnnnnnnnnnnnnnnnnnnnnnnnnnnnnnnnnnnnnnnnnnnnnnnnnnnnnnnnnnnnnnnnnnnnnnnnnnnnnnnnnnnnnnnnnnnnnnnnnnnnnnnnnnnnnnnnnnnnnnnnnnnnnnnnnnnnnnnnnnnnnnnnnnnnnnnnnnnnnnnnnnnnnnnnnnnnnnnnnnnnnnnnnnnnnnnnnnnnnnnnnnnnnnnnnnnnnnnnnnnnnnnnnnnnnnnnnnnnnnnnnnnnnnnnnnnnnnnnnnnnnnnnnnnnnnnnnnnnnnnnnnnnnnnnnnnnnnnnnnnnnnnnnnnnnnnnnnnnnnnnnnnnnnnnnnnnnnnnnnnnnnnnnnnnnnnnnnnnnnnnnnnnnnnnnnnnnnnnnnnnnnnnnnnnnnnnnnnnnnnnnnnnnnnnnnnnnnnnnnnnnnnnnnnnnnnnnnnnnnnnnnnnnnnnnnnnnnnnnnnnnnnnnnnnnnnnnnnnnnnnnnnnnnnnnnnnnnnnnnnnnnnnnnnnnnnnnnnnnnnnnnnnnnnnnnnnnnnnnnnnnnnnnnnnnnnnnnnnnnnnnnnnnnnnnnnnnnnnnnnnnnnnnnnnnnnnnnnnnnnnnnnnnnnnnnnnnnnnnnnnnnnnnnnnnnnnnnnnnnnnnnnnnnnnnnnnnnnnnnnnnnnnnnnnnnnnnnnnnnnnnnnnnnnnnnnnnnnnnnnnnnnnnnnnnnnnnnnnnnnnnnnnnnnnnnnnnnnnnnnnnnnnnnnnnnnnnnnnnnnnnnnnnnnnnnnnnnnnnnnnnnnnnnnnnnnnnnnnnnnnnnnnnnnnnnnnnnnnnnnnnnnnnnnnnnnnnnnnnnnnnnnnnnnnnnnnnnnnnnnnnnnnnnnnnnnnnnnnnnnnnnnnnnnnnnnnnnnnnnnnnnnnnnnnnnnnnnnnnnnnnnnnnnnnnnnnnnnnnnnnnnnnnnnnnnnnnnnnnnnnnnnnnnnnnnnnnnnnnnnnnnnnnnnnnnnnnnnnnnnnnnnnnnnnnnnnnnnnnnnnnnnnnnnnnnnnnnnnnnnnnnnnnnnnnnnnnnnnnnnnnnnnnnnnnnnnnnnnnnnnnnnnnnnnnnnnnnnnnnnnnnnnnnnnnnnnnnnnnnnnnnnnnnnnnnnnnnnnnnnnnnnnnnnnnnnnnnnnnnnnnnnnnnnnnnnnnnnnnnnnnnnnnnnnnnnnnnnnnnnnnnnnnnnnnnnnnnnnnnnnnnnnnnnnnnnnnnnnnnnnnnnnnnnnnnnnnnnnnnnnnnnnnnnnnnnnnnnnnnnnnnnnnnnnnnnnnnnnnnnnnnnnnnnnnnnnnnnnnnnnnnnnnnnnnnnnnnnnnnnnnnnnnnnnnnnnnnnnnnnnnnnnnnnnnnnnnnnnnnnnnnnnnnnnnnnnnnnnnnnnnnnnnnnnnnnnnnnnnnnnnnnnnnnnnnnnnnnnnnnnnnnnnnnnnnnnnnnnnnnnnnnnnnnnnnnnnnnnnnnnnnnnnnnnnnnnnnnnnnnnnnnnnnnnnnnnnnnnnnnnnnnnnnnnnnnnnnnnnnnnnnnnnnnnnnnnnnnnnnnnnnnnnnnnnnnnnnnnnnnnnnnnnnnnnnnnnnnnnnnnnnnnnnnnnnnnnnnnnnnnnnnnnnnnnnnnnnnnnnnnnnnnnnnnnnnnnnnnnnnnnnnnnnnnnnnnnnnnnnnnnnnnnnnnnnnnnnnnnnnnnnnnnnnnnnnnnnnnnnnnnnnnnnnnnnnnnnnnnnnnnnnnnnnnnnnnnnnnnnnnnnnnnnnnnnnnnnnnnnnnnnnnnnnnnnnnnnnnnnnnnnnnnnnnnnnnnnnnnnnnnnnnnnnnnnnnnnnnnnnnnnnnnnnnnnnnnnnnnnnnnnnnnnnnnnnnnnnnnnnnnnnnnnnnnnnnnnnnnnnnnnnnnnnnnnnnnnnnnnnnnnnnnnnnnnnnnnnnnnnnnnnnnnnnnnnnnnnnnnnnnnnnnnnnnnnnnnnnnnnnnnnnnnnnnnnnnnnnnnnnnnnnnnnnnnnnnnnnnnnnnnnnnnnnnnnnnnnnnnnnnnnnnnnnnnnnnnnnnnnnnnnnnnnnnnnnnnnnnnnnnnnnnnnnnnnnnnnnnnnnnnnnnnnnnnnnnnnnnnnnnnnnnnnnnnnnnnnnnnnnnnnnnnnnnnnnnnnnnnnnnnnnnnnnnnnnnnnnnnnnnnnnnnnnnnnnnnnnnnnnnnnnnnnnnnnnnnnnnnnnnnnnnnnnnnnnnnnnnnnnnnnnnnnnnnnnnnnnnnnnnnnnnnnnnnnnnnnnnnnnnnnnnnnnnnnnnnnnnnnnnnnnnnnnnnnnnnnnnnnnnnnnnnnnnnnnnnnnnnnnnnnnnnnnnnnnnnnnnnnnnnnnnnnnnnnnnnnnnnnnnnnnnnnnnnnnnnnnnnnnnnnnnnnnnnnnnnnnnnnnnnnnnnnnnnnnnnnnnnnnnnnnnnnnnnnnnnnnnnnnnnnnnnnnnnnnnnnnnnnnnnnnnnnnnnnnnnnnnnnnnnnnnnnnnnnnnnnnnnnnnnnnnnnnnnnnnnnnnnnnnnnnnnnnnnnnnnnnnnnnnnnnnnnnnnnnnnnnnnnnnnnnnnnnnnnnnnnnnnnnnnnnnnnnnnnnnnnnnnnnnnnnnnnnnnnnnnnnnnnnnnnnnnnnnnnnnnnnnnnnnnnnnnnnnnnnnnnnnnnnnnnnnnnnnnnnnnnnnnnnnnnnnnnnnnnnnnnnnnnnnnnnnnnnnnnnnnnnnnnnnnnnnnnnnnnnnnnnnnnnnnnnnnnnnnnnnnnnnnnnnnnnnnnnnnnnnnnnnnnnnnnnnnnnnnnnnnnnnnnnnnnnnnnnnnnnnnnnnnnnnnnnnnnnnnnnnnnnnnnnnnnnnnnnnnnnnnnnnnnnnnnnnnnnnnnnnnnnnnnnnnnnnnnnnnnnnnnnnnnnnnnnnnnnnnnnnnnnnnnnnnnnnnnnnnnnnnnnnnnnnnnnnnnnnnnnnnnnnnnnnnnnnnnnnnnnnnnnnnnnnnnnnnnnnnnnnnnnnnnnnnnnnnnnnnnnnnnnnnnnnnnnnnnnnnnnnnnnnnnnnnnnnnnnnnnnnnnnnnnnnnnnnnnnnnnnnnnnnnnnnnnnnnnnnnnnnnnnnnnnnnnnnnnnnnnnnnnnnnnnnnnnnnnnnnnnnnnnnnnnnnnnnnnnnnnnnnnnnnnnnnnnnnnnnnnnnnnnnnnnnnnnnnnnnnnnnnnnnnnnnnnnnnnnnnnnnnnnnnnnnnnnnnnnnnnnnnnnnnnnnnnnnnnnnnnnnnnnnnnnnnnnnnnnnnnnnnnnnnnnnnnnnnnnnnnnnnnnnnnnnnnnnnnnnnnnnnnnnnnnnnnnnnnnnnnnnnnnnnnnnnnnnnnnnnnnnnnnnnnnnnnnnnnnnnnnnnnnnnnnnnnnnnnnnnnnnnnnnnnnnnnnnnnnnnnnnnnnnnnnnnnnnnnnnnnnnnnnnnnnnnnnnnnnnnnnnnnnnnnnnnnnnnnnnnnnnnnnnnnnnnnnnnnnnnnnnnnnnnnnnnnnnnnnnnnnnnnnnnnnnnnnnnnnnnnnnnnnnnnnnnnnnnnnnnnnnnnnnnnnnnnnnnnnnnnnnnnnnnnnnnnnnnnnnnnnnnnnnnnnnnnnnnnnnnnnnnnnnnnnnnnnnnnnnnnnnnnnnnnnnnnnnnnnnnnnnnnnnnnnnnnnnnnnnnnnnnnnnnnnnnnnnnnnnnnnnnnnnnnnnnnnnnnnnnnnnnnnnnnnnnnnnnnnnnnnnnnnnnnnnnnnnnnnnnnnnnnnnnnnnnnnnnnnnnnnnnnnnnnnnnnnnnnnnnnnnnnnnnnnnnnnnnnnnnnnnnnnnnnnnnnnnnnnnnnnnnnnnnnnnnnnnnnnnnnnnnnnnnnnnnnnnnnnnnnnnnnnnnnnnnnnnnnnnnnnnnnnnnnnnnnnnnnnnnnnnnnnnnnnnnnnnnnnnnnnnnnnnnnnnnnnnnnnnnnnnnnnnnnnnnnnnnnnnnnnnnnnnnnnnnnnnnnnnnnnnnnnnnnnnnnnnnnnnnnnnnnnnnnnnnnnnnnnnnnnnnnnnnnnnnnnnnnnnnnnnnnnnnnnnnnnnnnnnnnnnnnnnnnnnnnnnnnnnnnnnnnnnnnnnnnnnnnnnnnnnnnnnnnnnnnnnnnnnnnnnnnnnnnnnnnnnnnnnnnnnnnnnnnnnnnnnnnnnnnnnnnnnnnnnnnnnnnnnnnnnnnnnnnnnnnnnnnnnnnnnnnnnnnnnnnnnnnnnnnnnnnnnnnnnnnnnnnnnnnnnnnnnnnnnnnnnnnnnnnnnnnnnnnnnnnnnnnnnnnnnnnnnnnnnnnnnnnnnnnnnnnnnnnnnnnnnnnnnnnnnnnnnnnnnnnnnnnnnnnnnnnnnnnnnnnnnnnnnnnnnnnnnnnnnnnnnnnnnnnnnnnnnnnnnnnnnnnnnnnnnnnnnnnnnnnnnnnnnnnnnnnnnnnnnnnnnnnnnnnnnnnnnnnnnnnnnnnnnnnnnnnnnnnnnnnnnnnnnnnnnnnnnnnnnnnnnnnnnnnnnnnnnnnnnnnnnnnnnnnnnnnnnnnnnnnnnnnnnnnnnnnnnnnnnnnnnnnnnnnnnnnnnnnnnnnnnnnnnnnnnnnnnnnnnnnnnnnnnnnnnnnnnnnnnnnnnnnnnnnnnnnnnnnnnnnnnnnnnnnnnnnnnnnnnnnnnnnnnnnnnnnnnnnnnnnnnnnnnnnnnnnnnnnnnnnnnnnnnnnnnnnnnnnnnnnnnnnnnnnnnnnnnnnnnnnnnnnnnnnnnnnnnnnnnnnnnnnnnnnnnnnnnnnnnnnnnnnnnnnnnnnnnnnnnnnnnnnnnnnnnnnnnnnnnnnnnnnnnnnnnnnnnnnnnnnnnnnnnnnnnnnnnnnnnnnnnnnnnnnnnnnnnnnnnnnnnnnnnnnnnnnnnnnnnnnnnnnnnnnnnnnnnnnnnnnnnnnnnnnnnnnnnnnnnnnnnnnnnnnnnnnnnnnnnnnnnnnnnnnnnnnnnnnnnnnnnnnnnnnnnnnnnnnnnnnnnnnnnnnnnnnnnnnnnnnnnnnnnnnnnnnnnnnnnnnnnnnnnnnnnnnnnnnnnnnnnnnnnnnnnnnnnnnnnnnnnnnnnnnnnnnnnnnnnnnnnnnnnnnnnnnnnnnnnnnnnnnnnnnnnnnnnnnnnnnnnnnnnnnnnnnnnnnnnnnnnnnnnnnnnnnnnnnnnnnnnnnnnnnnnnnnnnnnnnnnnnnnnnnnnnnnnnnnnnnnnnnnnnnnnnnnnnnnnnnnnnnnnnnnnnnnnnnnnnnnnnnnnnnnnnnnnnnnnnnnnnnnnnnnnnnnnnnnnnnnnnnnnnnnnnnnnnnnnnnnnnnnnnnnnnnnnnnnnnnnnnnnnnnnnnnnnnnnnnnnnnnnnnnnnnnnnnnnnnnnnnnnnnnnnnnnnnnnnnnnnnnnnnnnnnnnnnnnnnnnnnnnnnnnnnnnnnnnnnnnnnnnnnnnnnnnnnnnnnnnnnnnnnnnnnnnnnnnnnnnnnnnnnnnnnnnnnnnnnnnnnnnnnnnnnnnnnnnnnnnnnnnnnnnnnnnnnnnnnnnnnnnnnnnnnnnnnnnnnnnnnnnnnnnnnnnnnnnnnnnnnnnnnnnnnnnnnnnnnnnnnnnnnnnnnnnnnnnnnnnnnnnnnnnnnnnnnnnnnnnnnnnnnnnnnnnnnnnnnnnnnnnnnnnnnnnnnnnnnnnnnnnnnnnnnnnnnnnnnnnnnnnnnnnnnnnnnnnnnnnnnnnnnnnnnnnnnnnnnnnnnnnnnnnnnnnnnnnnnnnnnnnnnnnnnnnnnnnnnnnnnnnnnnnnnnnnnnnnnnnnnnnnnnnnnnnnnnnnnnnnnnnnnnnnnnnnnnnnnnnnnnnnnnnnnnnnnnnnnnnnnnnnnnnnnnnnnnnnnnnnnnnnnnnnnnnnnnnnnnnnnnnnnnnnnnnnnnnnnnnnnnnnnnnnnnnnnnnnnnnnnnnnnnnnnnnnnnnnnnnnnnnnnnnnnnnnnnnnnnnnnnnnnnnnnnnnnnnnnnnnnnnnnnnnnnnnnnnnnnnnnnnnnnnnnnnnnnnnnnnnnnnnnnnnnnnnnnnnnnnnnnnnnnnnnnnnnnnnnnnnnnnnnnnnnnnnnnnnnnnnnnnnnnnnnnnnnnnnnnnnnnnnnnnnnnnnnnnnnnnnnnnnnnnnnnnnnnnnnnnnnnnnnnnnnnnnnnnnnnnnnnnnnnnnnnnnnnnnnnnnnnnnnnnnnnnnnnnnnnnnnnnnnnnnnnnnnnnnnnnnnnnnnnnnnnnnnnnnnnnnnnnnnnnnnnnnnnnnnnnnnnnnnnnnnnnnnnnnnnnnnnnnnnnnnnnnnnnnnnnnnnnnnnnnnnnnnnnnnnnnnnnnnnnnnnnnnnnnnnnnnnnnnnnnnnnnnnnnnnnnnnnnnnnnnnnnnnnnnnnnnnnnnnnnnnnnnnnnnnnnnnnnnnnnnnnnnnnnnnnnnnnnnnnnnnnnnnnnnnnnnnnnnnnnnnnnnnnnnnnnnnnnnnnnnnnnnnnnnnnnnnnnnnnnnnnnnnnnnnnnnnnnnnnnnnnnnnnnnnnnnnnnnnnnnnnnnnnnnnnnnnnnnnnnnnnnnnnnnnnnnnnnnnnnnnnnnnnnnnnnnnnnnnnnnnnnnnnnnnnnnnnnnnnnnnnnnnnnnnnnnnnnnnnnnnnnnnnnnnnnnnnnnnnnnnnnnnnnnnnnnnnnnnnnnnnnnnnnnnnnnnnnnnnnnnnnnnnnnnnnnnnnnnnnnnnnnnnnnnnnnnnnnnnnnnnnnnnnnnnnnnnnnnnnnnnnnnnnnnnnnnnnnnnnnnnnnnnnnnnnnnnnnnnnnnnnnnnnnnnnnnnnnnnnnnnnnnnnnnnnnnnnnnnnnnnnnnnnnnnnnnnnnnnnnnnnnnnnnnnnnnnnnnnnnnnnnnnnnnnnnnnnnnnnnnnnnnnnnnnnnnnnnnnnnnnnnnnnnnnnnnnnnnnnnnnnnnnnnnnnnnnnnnnnnnnnnnnnnnnnnnnnnnnnnnnnnnnnnnnnnnnnnnnnnnnnnnnnnnnnnnnnnnnnnnnnnnnnnnnnnnnnnnnnnnnnnnnnnnnnnnnnnnnnnnnnnnnnnnnnnnnnnnnnnnnnnnnnnnnnnnnnnnnnnnnnnnnnnnnnnnnnnnnnnnnnnnnnnnnnnnnnnnnnnnnnnnnnnnnnnnnnnnnnnnnnnnnnnnnnnnnnnnnnnnnnnnnnnnnnnnnnnnnnnnnnnnnnnnnnnnnnnnnnnnnnnnnnnnnnnnnnnnnnnnnnnnnnnnnnnnnnnnnnnnnnnnnnnnnnnnnnnnnnnnnnnnnnnnnnnnnnnnnnnnnnnnnnnnnnnnnnnnnnnnnnnnnnnnnnnnnnnnnnnnnnnnnnnnnnnnnnnnnnnnnnnnnnnnnnnnnnnnnnnnnnnnnnnnnnnnnnnnnnnnnnnnnnnnnnnnnnnnnnnnnnnnnnnnnnnnnnnnnnnnnnnnnnnnnnnnnnnnnnnnnnnnnnnnnnnnnnnnnnnnnnnnnnnnnnnnnnnnnnnnnnnnnnnnnnnnnnnnnnnnnnnnnnnnnnnnnnnnnnnnnnnnnnnnnnnnnnnnnnnnnnnnnnnnnnnnnnnnnnnnnnnnnnnnnnnnnnnnnnnnnnnnnnnnnnnnnnnnnnnnnnnnnnnnnnnnnnnnnnnnnnnnnnnnnnnnnnnnnnnnnnnnnnnnnnnnnnnnnnnnnnnnnnnnnnnnnnnnnnnnnnnnnnnnnnnnnnnnnnnnnnnnnnnnnnnnnnnnnnnnnnnnnnnnnnnnnnnnnnnnnnnnnnnnnnnnnnnnnnnnnnnnnnnnnnnnnnnnnnnnnnnnnnnnnnnnnnnnnnnnnnnnnnnnnnnnnnnnnnnnnnnnnnnnnnnnnnnnnnnnnnnnnnnnnnnnnnnnnnnnnnnnnnnnnnnnnnnnnnnnnnnnnnnnnnnnnnnnnnnnnnnnnnnnnnnnnnnnnnnnnnnnnnnnnnnnnnnnnnnnnnnnnnnnnnnnnnnnnnnnnnnnnnnnnnnnnnnnnnnnnnnnnnnnnnnnnnnnnnnnnnnnnnnnnnnnnnnnnnnnnnnnnnnnnnnnnnnnnnnnnnnnnnnnnnnnnnnnnnnnnnnnnnnnnnnnnnnnnnnnnnnnnnnnnnnnnnnnnnnnnnnnnnnnnnnnnnnnnnnnnnnnnnnnnnnnnnnnnnnnnnnnnnnnnnnnnnnnnnnnnnnnnnnnnnnnnnnnnnnnnnnnnnnnnnnnnnnnnnnnnnnnnnnnnnnnnnnnnnnnnnnnnnnnnnnnnnnnnnnnnnnnnnnnnnnnnnnnnnnnnnnnnnnnnnnnnnnnnnnnnnnnnnnnnnnnnnnnnnnnnnnnnnnnnnnnnnnnnnnnnnnnnnnnnnnnnnnnnnnnnnnnnnnnnnnnnnnnnnnnnnnnnnnnnnnnnnnnnnnnnnnnnnnnnnnnnnnnnnnnnnnnnnnnnnnnnnnnnnnnnnnnnnnnnnnnnnnnnnnnnnnnnnnnnnnnnnnnnnnnnnnnnnnnnnnnnnnnnnnnnnnnnnnnnnnnnnnnnnnnnnnnnnnnnnnnnnnnnnnnnnnnnnnnnnnnnnnnnnnnnnnnnnnnnnnnnnnnnnnnnnnnnnnnnnnnnnnnnnnnnnnnnnnnnnnnnnnnnnnnnnnnnnnnnnnnnnnnnnnnnnnnnnnnnnnnnnnnnnnnnnnnnnnnnnnnnnnnnnnnnnnnnnnnnnnnnnnnnnnnnnnnnnnnnnnnnnnnnnnnnnnnnnnnnnnnnnnnnnnnnnnnnnnnnnnnnnnnnnnnnnnnnnnnnnnnnnnnnnnnnnnnnnnnnnnnnnnnnnnnnnnnnnnnnnnnnnnnnnnnnnnnnnnnnnnnnnnnnnnnnnnnnnnnnnnnnnnnnnnnnnnnnnnnnnnnnnnnnnnnnnnnnnnnnnnnnnnnnnnnnnnnnnnnnnnnnnnnnnnnnnnnnnnnnnnnnnnnnnnnnnnnnnnnnnnnnnnnnnnnnnnnnnnnnnnnnnnnnnnnnnnnnnnnnnnnnnnnnnnnnnnnnnnnnnnnnnnnnnnnnnnnnnnnnnnnnnnnnnnnnnnnnnnnnnnnnnnnnnnnnnnnnnnnnnnnnnnnnnnnnnnnnnnnnnnnnnnnnnnnnnnnnnnnnnnnnnnnnnnnnnnnnnnnnnnnnnnnnnnnnnnnnnnnnnnnnnnnnnnnnnnnnnnnnnnnnnnnnnnnnnnnnnnnnnnnnnnnnnnnnnnnnnnnnnnnnnnnnnnnnnnnnnnnnnnnnnnnnnnnnnnnnnnnnnnnnnnnnnnnnnnnnnnnnnnnnnnnnnnnnnnnnnnnnnnnnnnnnnnnnnnnnnnnnnnnnnnnnnnnnnnnnnnnnnnnnnnnnnnnnnnnnnnnnnnnnnnnnnnnnnnnnnnnnnnnnnnnnnnnnnnnnnnnnnnnnnnnnnnnnnnnnnnnnnnnnnnnnnnnnnnnnnnnnnnnnnnnnnnnnnnnnnnnnnnnnnnnnnnnnnnnnnnnnnnnnnnnnnnnnnnnnnnnnnnnnnnnnnnnnnnnnnnnnnnnnnnnnnnnnnnnnnnnnnnnnnnnnnnnnnnnnnnnnnnnnnnnnnnnnnnnnnnnnnnnnnnnnnnnnnnnnnnnnnnnnnnnnnnnnnnnnnnnnnnnnnnnnnnnnnnnnnnnnnnnnnnnnnnnnnnnnnnnnnnnnnnnnnnnnnnnnnnnnnnnnnnnnnnnnnnnnnnnnnnnnnnnnnnnnnnnnnnnnnnnnnnnnnnnnnnnnnnnnnnnnnnnnnnnnnnnnnnnnnnnnnnnnnnnnnnnnnnnnnnnnnnnnnnnnnnnnnnnnnnnnnnnnnnnnnnnnnnnnnnnnnnnnnnnnnnnnnnnnnnnnnnnnnnnnnnnnnnnnnnnnnnnnnnnnnnnnnnnnnnnnnnnnnnnnnnnnnnnnnnnnnnnnnnnnnnnnnnnnnnnnnnnnnnnnnnnnnnnnnnnnnnnnnnnnnnnnnnnnnnnnnnnnnnnnnnnnnnnnnnnnnnnnnnnnnnnnnnnnnnnnnnnnnnnnnnnnnnnnnnnnnnnnnnnnnnnnnnnnnnnnnnnnnnnnnnnnnnnnnnnnnnnnnnnnnnnnnnnnnnnnnnnnnnnnnnnnnnnnnnnnnnnnnnnnnnnnnnnnnnnnnnnnnnnnnnnnnnnnnnnnnnnnnnnnnnnnnnnnnnnnnnnnnnnnnnnnnnnnnnnnnnnnnnnnnnnnnnnnnnnnnnnnnnnnnnnnnnnnnnnnnnnnnnnnnnnnnnnnnnnnnnnnnnnnnnnnnnnnnnnnnnnnnnnnnnnnnnnnnnnnnnnnnnnnnnnnnnnnnnnnnnnnnnnnnnnnnnnnnnnnnnnnnnnnnnnnnnnnnnnnnnnnnnnnnnnnnnnnnnnnnnnnnnnnnnnnnnnnnnnnnnnnnnnnnnnnnnnnnnnnnnnnnnnnnnnnnnnnnnnnnnnnnnnnnnnnnnnnnnnnnnnnnnnnnnnnnnnnnnnnnnnnnnnnnnnnnnnnnnnnnnnnnnnnnnnnnnnnnnnnnnnnnnnnnnnnnnnnnnnnnnnnnnnnnnnnnnnnnnnnnnnnnnnnnnnnnnnnnnnnnnnnnnnnnnnnnnnnnnnnnnnnnnnnnnnnnnnnnnnnnnnnnnnnnnnnnnnnnnnnnnnnnnnnnnnnnnnnnnnnnnnnnnnnnnnnnnnnnnnnnnnnnnnnnnnnnnnnnnnnnnnnnnnnnnnnnnnnnnnnnnnnnnnnnnnnnnnnnnnnnnnnnnnnnnnnnnnnnnnnnnnnnnnnnnnnnnnnnnnnnnnnnnnnnnnnnnnnnnnnnnnnnnnnnnnnnnnnnnnnnnnnnnnnnnnnnnnnnnnnnnnnnnnnnnnnnnnnnnnnnnnnnnnnnnnnnnnnnnnnnnnnnnnnnnnnnnnnnnnnnnnnnnnnnnnnnnnnnnnnnnnnnnnnnnnnnnnnnnnnnnnnnnnnnnnnnnnnnnnnnnnnnnnnnnnnnnnnnnnnnnnnnnnnnnnnnnnnnnnnnnnnnnnnnnnnnnnnnnnnnnnnnnnnnnnnnnnnnnnnnnnnnnnnnnnnnnnnnnnnnnnnnnnnnnnnnnnnnnnnnnnnnnnnnnnnnnnnnnnnnnnnnnnnnnnnnnnnnnnnnnnnnnnnnnnnnnnnnnnnnnnnnnnnnnnnnnnnnnnnnnnnnnnnnnnnnnnnnnnnnnnnnnnnnnnnnnnnnnnnnnnnnnnnnnnnnnnnnnnnnnnnnnnnnnnnnnnnnnnnnnnnnnnnnnnnnnnnnnnnnnnnnnnnnnnnnnnnnnnnnnnnnnnnnnnnnnnnnnnnnnnnnnnnnnnnnnnnnnnnnnnnnnnnnnnnnnnnnnnnnnnnnnnnnnnnnnnnnnnnnnnnnnnnnnnnnnnnnnnnnnnnnnnnnnnnnnnnnnnnnnnnnnnnnnnnnnnnnnnnnnnnnnnnnnnnnnnnnnnnnnnnnnnnnnnnnnnnnnnnnnnnnnnnnnnnnnnnnnnnnnnnnnnnnnnnnnnnnnnnnnnnnnnnnnnnnnnnnnnnnnnnnnnnnnnnnnnnnnnnnnnnnnnnnnnnnnnnnnnnnnnnnnnnnnnnnnnnnnnnnnnnnnnnnnnnnnnnnnnnnnnnnnnnnnnnnnnnnnnnnnnnnnnnnnnnnnnnnnnnnnnnnnnnnnnnnnnnnnnnnnnnnnnnnnnnnnnnnnnnnnnnnnnnnnnnnnnnnnnnnnnnnnnnnnnnnnnnnnnnnnnnnnnnnnnnnnnnnnnnnnnnnnnnnnnnnnnnnnnnnnnnnnnnnnnnnnnnnnnnnnnnnnnnnnnnnnnnnnnnnnnnnnnnnnnnnnnnnnnnnnnnnnnnnnnnnnnnnnnnnnnnnnnnnnnnnnnnnnnnnnnnnnnnnnnnnnnnnnnnnnnnnnnnnnnnnnnnnnnnnnnnnnnnnnnnnnnnnnnnnnnnnnnnnnnnnnnnnnnnnnnnnnnnnnnnnnnnnnnnnnnnnnnnnnnnnnnnnnnnnnnnnnnnnnnnnnnnnnnnnnnnnnnnnnnnnnnnnnnnnnnnnnnnnnnnnnnnnnnnnnnnnnnnnnnnnnnnnnnnnnnnnnnnnnnnnnnnnnnnnnnnnnnnnnnnnnnnnnnnnnnnnnnnnnnnnnnnnnnnnnnnnnnnnnnnnnnnnnnnnnnnnnnnnnnnnnnnnnnnnnnnnnnnnnnnnnnnnnnnnnnnnnnnnnnnnnnnnnnnnnnnnnnnnnnnnnnnnnnnnnnnnnnnnnnnnnnnnnnnnnnnnnnnnnnnnnnnnnnnnnnnnnnnnnnnnnnnnnnnnnnnnnnnnnnnnnnnnnnnnnnnnnnnnnnnnnnnnnnnnnnnnnnnnnnnnnnnnnnnnnnnnnnnnnnnnnnnnnnnnnnnnnnnnnnnnnnnnnnnnnnnnnnnnnnnnnnnnnnnnnnnnnnnnnnnnnnnnnnnnnnnnnnnnnnnnnnnnnnnnnnnnnnnnnnnnnnnnnnnnnnnnnnnnnnnnnnnnnnnnnnnnnnnnnnnnnnnnnnnnnnnnnnnnnnnnnnnnnnnnnnnnnnnnnnnnnnnnnnnnnnnnnnnnnnnnnnnnnnnnnnnnnnnnnnnnnnnnnnnnnnnnnnnnnnnnnnnnnnnnnnnnnnnnnnnnnnnnnnnnnnnnnnnnnnnnnnnnnnnnnnnnnnnnnnnnnnnnnnnnnnnnnnnnnnnnnnnnnnnnnnnnnnnnnnnnnnnnnnnnnnnnnnnnnnnnnnnnnnnnnnnnnnnnnnnnnnnnnnnnnnnnnnnnnnnnnnnnnnnnnnnnnnnnnnnnnnnnnnnnnnnnnnnnnnnnnnnnnnnnnnnnnnnnnnnnnnnnnnnnnnnnnnnnnnnnnnnnnnnnnnnnnnnnnnnnnnnnnnnnnnnnnnnnnnnnnnnnnnnnnnnnnnnnnnnnnnnnnnnnnnnnnnnnnnnnnnnnnnnnnnnnnnnnnnnnnnnnnnnnnnnnnnnnnnnnnnnnnnnnnnnnnnnnnnnnnnnnnnnnnnnnnnnnnnnnnnnnnnnnnnnnnnnnnnnnnnnnnnnnnnnnnnnnnnnnnnnnnnnnnnnnnnnnnnnnnnnnnnnnnnnnnnnnnnnnnnnnnnnnnnnnnnnnnnnnnnnnnnnnnnnnnnnnnnnnnnnnnnnnnnnnnnnnnnnnnnnnnnnnnnnnnnnnnnnnnnnnnnnnnnnnnnnnnnnnnnnnnnnnnnnnnnnnnnnnnnnnnnnnnnnnnnnnnnnnnnnnnnnnnnnnnnnnnnnnnnnnnnnnnnnnnnnnnnnnnnnnnnnnnnnnnnnnnnnnnnnnnnnnnnnnnnnnnnnnnnnnnnnnnnnnnnnnnnnnnnnnnnnnnnnnnnnnnnnnnnnnnnnnnnnnnnnnnnnnnnnnnnnnnnnnnnnnnnnnnnnnnnnnnnnnnnnnnnnnnnnnnnnnnnnnnnnnnnnnnnnnnnnnnnnnnnnnnnnnnnnnnnnnnnnnnnnnnnnnnnnnnnnnnnnnnnnnnnnnnnnnnnnnnnnnnnnnnnnnnnnnnnnnnnnnnnnnnnnnnnnnnnnnnnnnnnnnnnnnnnnnnnnnnnnnnnnnnnnnnnnnnnnnnnnnnnnnnnnnnnnnnnnnnnnnnnnnnnnnnnnnnnnnnnnnnnnnnnnnnnnnnnnnnnnnnnnnnnnnnnnnnnnnnnnnnnnnnnnnnnnnnnnnnnnnnnnnnnnnnnnnnnnnnnnnnnnnnnnnnnnnnnnnnnnnnnnnnnnnnnnnnnnnnnnnnnnnnnnnnnnnnnnnnnnnnnnnnnnnnnnnnnnnnnnnnnnnnnnnnnnnnnnnnnnnnnnnnnnnnnnnnnnnnnnnnnnnnnnnnnnnnnnnnnnnnnnnnnnnnnnnnnnnnnnnnnnnnnnnnnnnnnnnnnnnnnnnnnnnnnnnnnnnnnnnnnnnnnnnnnnnnnnnnnnnnnnnnnnnnnnnnnnnnnnnnnnnnnnnnnnnnnnnnnnnnnnnnnnnnnnnnnnnnnnnnnnnnnnnnnnnnnnnnnnnnnnnnnnnnnnnnnnnnnnnnnnnnnnnnnnnnnnnnnnnnnnnnnnnnnnnnnnnnnnnnnnnnnnnnnnnnnnnnnnnnnnnnnnnnnnnnnnnnnnnnnnnnnnnnnnnnnnnnnnnnnnnnnnnnnnnnnnnnnnnnnnnnnnnnnnnnnnnnnnnnnnnnnnnnnnnnnnnnnnnnnnnnnnnnnnnnnnnnnnnnnnnnnnnnnnnnnnnnnnnnnnnnnnnnnnnnnnnnnnnnnnnnnnnnnnnnnnnnnnnnnnnnnnnnnnnnnnnnnnnnnnnnnnnnnnnnnnnnnnnnnnnnnnnnnnnnnnnnnnnnnnnnnnnnnnnnnnnnnnnnnnnnnnnnnnnnnnnnnnnnnnnnnnnnnnnnnnnnnnnnnnnnnnnnnnnnnnnnnnnnnnnnnnnnnnnnnnnnnnnnnnnnnnnnnnnnnnnnnnnnnnnnnnnnnnnnnnnnnnnnnnnnnnnnnnnnnnnnnnnnnnnnnnnnnnnnnnnnnnnnnnnnnnnnnnnnnnnnnnnnnnnnnnnnnnnnnnnnnnnnnnnnnnnnnnnnnnnnnnnnnnnnnnnnnnnnnnnnnnnnnnnnnnnnnnnnnnnnnnnnnnnnnnnnnnnnnnnnnnnnnnnnnnnnnnnnnnnnnnnnnnnnnnnnnnnnnnnnnnnnnnnnnnnnnnnnnnnnnnnnnnnnnnnnnnnnnnnnnnnnnnnnnnnnnnnnnnnnnnnnnnnnnnnnnnnnnnnnnnnnnnnnnnnnnnnnnnnnnnnnnnnnnnnnnnnnnnnnnnnnnnnnnnnnnnnnnnnnnnnnnnnnnnnnnnnnnnnnnnnnnnnnnnnnnnnnnnnnnnnnnnnnnnnnnnnnnnnnnnnnnnnnnnnnnnnnnnnnnnnnnnnnnnnnnnnnnnnnnnnnnnnnnnnnnnnnnnnnnnnnnnnnnnnnnnnnnnnnnnnnnnnnnnnnnnnnnnnnnnnnnnnnnnnnnnnnnnnnnnnnnnnnnnnnnnnnnnnnnnnnnnnnnnnnnnnnnnnnnnnnnnnnnnnnnnnnnnnnnnnnnnnnnnnnnnnnnnnnnnnnnnnnnnnnnnnnnnnnnnnnnnnnnnnnnnnnnnnnnnnnnnnnnnnnnnnnnnnnnnnnnnnnnnnnnnnnnnnnnnnnnnnnnnnnnnnnnnnnnnnnnnnnnnnnnnnnnnnnnnnnnnnnnnnnnnnnnnnnnnnnnnnnnnnnnnnnnnnnnnnnnnnnnnnnnnnnnnnnnnnnnnnnnnnnnnnnnnnnnnnnnnnnnnnnnnnnnnnnnnnnnnnnnnnnnnnnnnnnnnnnnnnnnnnnnnnnnnnnnnnnnnnnnnnnnnnnnnnnnnnnnnnnnnnnnnnnnnnnnnnnnnnnnnnnnnnnnnnnnnnnnnnnnnnnnnnnnnnnnnnnnnnnnnnnnnnnnnnnnnnnnnnnnnnnnnnnnnnnnnnnnnnnnnnnnnnnnnnnnnnnnnnnnnnnnnnnnnnnnnnnnnnnnnnnnnnnnnnnnnnnnnnnnnnnnnnnnnnnnnnnnnnnnnnnnnnnnnnnnnnnnnnnnnnnnnnnnnnnnnnnnnnnnnnnnnnnnnnnnnnnnnnnnnnnnnnnnnnnnnnnnnnnnnnnnnnnnnnnnnnnnnnnnnnnnnnnnnnnnnnnnnnnnnnnnnnnnnnnnnnnnnnnnnnnnnnnnnnnnnnnnnnnnnnnnnnnnnnnnnnnnnnnnnnnnnnnnnnnnnnnnnnnnnnnnnnnnnnnnnnnnnnnnnnnnnnnnnnnnnnnnnnnnnnnnnnnnnnnnnnnnnnnnnnnnnnnnnnnnnnnnnnnnnnnnnnnnnnnnnnnnnnnnnnnnnnnnnnnnnnnnnnnnnnnnnnnnnnnnnnnnnnnnnnnnnnnnnnnnnnnnnnnnnnnnnnnnnnnnnnnnnnnnnnnnnnnnnnnnnnnnnnnnnnnnnnnnnnnnnnnnnnnnnnnnnnnnnnnnnnnnnnnnnnnnnnnnnnnnnnnnnnnnnnnnnnnnnnnnnnnnnnnnnnnnnnnnnnnnnnnnnnnnnnnnnnnnnnnnnnnnnnnnnnnnnnnnnnnnnnnnnnnnnnnnnnnnnnnnnnnnnnnnnnnnnnnnnnnnnnnnnnnnnnnnnnnnnnnnnnnnnnnnnnnnnnnnnnnnnnnnnnnnnnnnnnnnnnnnnnnnnnnnnnnnnnnnnnnnnnnnnnnnnnnnnnnnnnnnnnnnnnnnnnnnnnnnnnnnnnnnnnnnnnnnnnnnnnnnnnnnnnnnnnnnnnnnnnnnnnnnnnnnnnnnnnnnnnnnnnnnnnnnnnnnnnnnnnnnnnnnnnnnnnnnnnnnnnnnnnnnnnnnnnnnnnnnnnnnnnnnnnnnnnnnnnnnnnnnnnnnnnnnnnnnnnnnnnnnnnnnnnnnnnnnnnnnnnnnnnnnnnnnnnnnnnnnnnnnnnnnnnnnnnnnnnnnnnnnnnnnnnnnnnnnnnnnnnnnnnnnnnnnnnnnnnnnnnnnnnnnnnnnnnnnnnnnnnnnnnnnnnnnnnnnnnnnnnnnnnnnnnnnnnnnnnnnnnnnnnnnnnnnnnnnnnnnnnnnnnnnnnnnnnnnnnnnnnnnnnnnnnnnnnnnnnnnnnnnnnnnnnnnnnnnnnnnnnnnnnnnnnnnnnnnnnnnnnnnnnnnnnnnnnnnnnnnnnnnnnnnnnnnnnnnnnnnnnnnnnnnnnnnnnnnnnnnnnnnnnnnnnnnnnnnnnnnnnnnnnnnnnnnnnnnnnnnnnnnnnnnnnnnnnnnnnnnnnnnnnnnnnnnnnnnnnnnnnnnnnnnnnnnnnnnnnnnnnnnnnnnnnnnnnnnnnnnnnnnnnnnnnnnnnnnnnnnnnnnnnnnnnnnnnnnnnnnnnnnnnnnnnnnnnnnnnnnnnnnnnnnnnnnnnnnnnnnnnnnnnnnnnnnnnnnnnnnnnnnnnnnnnnnnnnnnnnnnnnnnnnnnnnnnnnnnnnnnnnnnnnnnnnnnnnnnnnnnnnnnnnnnnnnnnnnnnnnnnnnnnnnnnnnnnnnnnnnnnnnnnnnnnnnnnnnnnnnnnnnnnnnnnnnnnnnnnnnnnnnnnnnnnnnnnnnnnnnnnnnnnnnnnnnnnnnnnnnnnnnnnnnnnnnnnnnnnnnnnnnnnnnnnnnnnnnnnnnnnnnnnnnnnnnnnnnnnnnnnnnnnnnnnnnnnnnnnnnnnnnnnnnnnnnnnnnnnnnnnnnnnnnnnnnnnnnnnnnnnnnnnnnnnnnnnnnnnnnnnnnnnnnnnnnnnnnnnnnnnnnnnnnnnnnnnnnnnnnnnnnnnnnnnnnnnnnnnnnnnnnnnnnnnnnnnnnnnnnnnnnnnnnnnnnnnnnnnnnnnnnnnnnnnnnnnnnnnnnnnnnnnnnnnnnnnnnnnnnnnnnnnnnnnnnnnnnnnnnnnnnnnnnnnnnnnnnnnnnnnnnnnnnnnnnnnnnnnnnnnnnnnnnnnnnnnnnnnnnnnnnnnnnnnnnnnnnnnnnnnnnnnnnnnnnnnnnnnnnnnnnnnnnnnnnnnnnnnnnnnnnnnnnnnnnnnnnnnnnnnnnnnnnnnnnnnnnnnnnnnnnnnnnnnnnnnnnnnnnnnnnnnnnnnnnnnnnnnnnnnnnnnnnnnnnnnnnnnnnnnnnnnnnnnnnnnnnnnnnnnnnnnnnnnnnnnnnnnnnnnnnnnnnnnnnnnnnnnnnnnnnnnnnnnnnnnnnnnnnnnnnnnnnnnnnnnnnnnnnnnnnnnnnnnnnnnnnnnnnnnnnnnnnnnnnnnnnnnnnnnnnnnnnnnnnnnnnnnnnnnnnnnnnnnnnnnnnnnnnnnnnnnnnnnnnnnnnnnnnnnnnnnnnnnnnnnnnnnnnnnnnnnnnnnnnnnnnnnnnnnnnnnnnnnnnnnnnnnnnnnnnnnnnnnnnnnnnnnnnnnnnnnnnnnnnnnnnnnnnnnnnnnnnnnnnnnnnnnnnnnnnnnnnnnnnnnnnnnnnnnnnnnnnnnnnnnnnnnnnnnnnnnnnnnnnnnnnnnnnnnnnnnnnnnnnnnnnnnnnnnnnnnnnnnnnnnnnnnnnnnnnnnnnnnnnnnnnnnnnnnnnnnnnnnnnnnnnnnnnnnnnnnnnnnnnnnnnnnnnnnnnnnnnnnnnnnnnnnnnnnnnnnnnnnnnnnnnnnnnnnnnnnnnnnnnnnnnnnnnnnnnnnnnnnnnnnnnnnnnnnnnnnnnnnnnnnnnnnnnnnnnnnnnnnnnnnnnnnnnnnnnnnnnnnnnnnnnnnnnnnnnnnnnnnnnnnnnnnnnnnnnnnnnnnnnnnnnnnnnnnnnnnnnnnnnnnnnnnnnnnnnnnnnnnnnnnnnnnnnnnnnnnnnnnnnnnnnnnnnnnnnnnnnnnnnnnnnnnnnnnnnnnnnnnnnnnnnnnnnnnnnnnnnnnnnnnnnnnnnnnnnnnnnnnnnnnnnnnnnnnnnnnnnnnnnnnnnnnnnnnnnnnnnnnnnnnnnnnnnnnnnnnnnnnnnnnnnnnnnnnnnnnnnnnnnnnnnnnnnnnnnnnnnnnnnnnnnnnnnnnnnnnnnnnnnnnnnnnnnnnnnnnnnnnnnnnnnnnnnnnnnnnnnnnnnnnnnnnnnnnnnnnnnnnnnnnnnnnnnnnnnnnnnnnnnnnnnnnnnnnnnnnnnnnnnnnnnnnnnnnnnnnnnnnnnnnnnnnnnnnnnnnnnnnnnnnnnnnnnnnnnnnnnnnnnnnnnnnnnnnnnnnnnnnnnnnnnnnnnnnnnnnnnnnnnnnnnnnnnnnnnnnnnnnnnnnnnnnnnnnnnnnnnnnnnnnnnnnnnnnnnnnnnnnnnnnnnnnnnnnnnnnnnnnnnnnnnnnnnnnnnnnnnnnnnnnnnnnnnnnnnnnnnnnnnnnnnnnnnnnnnnnnnnnnnnnnnnnnnnnnnnnnnnnnnnnnnnnnnnnnnnnnnnnnnnnnnnnnnnnnnnnnnnnnnnnnnnnnnnnnnnnnnnnnnnnnnnnnnnnnnnnnnnnnnnnnnnnnnnnnnnnnnnnnnnnnnnnnnnnnnnnnnnnnnnnnnnnnnnnnnnnnnnnnnnnnnnnnnnnnnnnnnnnnnnnnnnnnnnnnnnnnnnnnnnnnnnnnnnnnnnnnnnnnnnnnnnnnnnnnnnnnnnnnnnnnnnnnnnnnnnnnnnnnnnnnnnnnnnnnnnnnnnnnnnnnnnnnnnnnnnnnnnnnnnnnnnnnnnnnnnnnnnnnnnnnnnnnnnnnnnnnnnnnnnnnnnnnnnnnnnnnnnnnnnnnnnnnnnnnnnnnnnnnnnnnnnnnnnnnnnnnnnnnnnnnnnnnnnnnnnnnnnnnnnnnnnnnnnnnnnnnnnnnnnnnnnnnnnnnnnnnnnnnnnnnnnnnnnnnnnnnnnnnnnnnnnnnnnnnnnnnnnnnnnnnnnnnnnnnnnnnnnnnnnnnnnnnnnnnnnnnnnnnnnnnnnnnnnnnnnnnnnnnnnnnnnnnnnnnnnnnnnnnnnnnnnnnnnnnnnnnnnnnnnnnnnnnnnnnnnnnnnnnnnnnnnnnnnnnnnnnnnnnnnnnnnnnnnnnnnnnnnnnnnnnnnnnnnnnnnnnnnnnnnnnnnnnnnnnnnnnnnnnnnnnnnnnnnnnnnnnnnnnnnnnnnnnnnnnnnnnnnnnnnnnnnnnnnnnnnnnnnnnnnnnnnnnnnnnnnnnnnnnnnnnnnnnnnnnnnnnnnnnnnnnnnnnnnnnnnnnnnnnnnnnnnnnnnnnnnnnnnnnnnnnnnnnnnnnnnnnnnnnnnnnnnnnnnnnnnnnnnnnnnnnnnnnnnnnnnnnnnnnnnnnnnnnnnnnnnnnnnnnnnnnnnnnnnnnnnnnnnnnnnnnnnnnnnnnnnnnnnnnnnnnnnnnnnnnnnnnnnnnnnnnnnnnnnnnnnnnnnnnnnnnnnnnnnnnnnnnnnnnnnnnnnnnnnnnnnnnnnnnnnnnnnnnnnnnnnnnnnnnnnnnnnnnnnnnnnnnnnnnnnnnnnnnnnnnnnnnnnnnnnnnnnnnnnnnnnnnnnnnnnnnnnnnnnnnnnnnnnnnnnnnnnnnnnnnnnnnnnnnnnnnnnnnnnnnnnnnnnnnnnnnnnnnnnnnnnnnnnnnnnnnnnnnnnnnnnnnnnnnnnnnnnnnnnnnnnnnnnnnnnnnnnnnnnnnnnnnnnnnnnnnnnnnnnnnnnnnnnnnnnnnnnnnnnnnnnnnnnnnnnnnnnnnnnnnnnnnnnnnnnnnnnnnnnnnnnnnnnnnnnnnnnnnnnnnnnnnnnnnnnnnnnnnnnnnnnnnnnnnnnnnnnnnnnnnnnnnnnnnnnnnnnnnnnnnnnnnnnnnnnnnnnnnnnnnnnnnnnnnnnnnnnnnnnnnnnnnnnnnnnnnnnnnnnnnnnnnnnnnnnnnnnnnnnnnnnnnnnnnnnnnnnnnnnnnnnnnnnnnnnnnnnnnnnnnnnnnnnnnnnnnnnnnnnnnnnnnnnnnnnnnnnnnnnnnnnnnnnnnnnnnnnnnnnnnnnnnnnnnnnnnnnnnnnnnnnnnnnnnnnnnnnnnnnnnnnnnnnnnnnnnnnnnnnnnnnnnnnnnnnnnnnnnnnnnnnnnnnnnnnnnnnnnnnnnnnnnnnnnnnnnnnnnnnnnnnnnnnnnnnnnnnnnnnnnnnnnnnnnnnnnnnnnnnnnnnnnnnnnnnnnnnnnnnnnnnnnnnnnnnnnnnnnnnnnnnnnnnnnnnnnnnnnnnnnnnnnnnnnnnnnnnnnnnnnnnnnnnnnnnnnnnnnnnnnnnnnnnnnnnnnnnnnnnnnnnnnnnnnnnnnnnnnnnnnnnnnnnnnnnnnnnnnnnnnnnnnnnnnnnnnnnnnnnnnnnnnnnnnnnnnnnnnnnnnnnnnnnnnnnnnnnnnnnnnnnnnnnnnnnnnnnnnnnnnnnnnnnnnnnnnnnnnnnnnnnnnnnnnnnnnnnnnnnnnnnnnnnnnnnnnnnnnnnnnnnnnnnnnnnnnnnnnnnnnnnnnnnnnnnnnnnnnnnnnnnnnnnnnnnnnnnnnnnnnnnnnnnnnnnnnnnnnnnnnnnnnnnnnnnnnnnnnnnnnnnnnnnnnnnnnnnnnnnnnnnnnnnnnnnnnnnnnnnnnnnnnnnnnnnnnnnnnnnnnnnnnnnnnnnnnnnnnnnnnnnnnnnnnnnnnnnnnnnnnnnnnnnnnnnnnnnnnnnnnnnnnnnnnnnnnnnnnnnnnnnnnnnnnnnnnnnnnnnnnnnnnnnnnnnnnnnnnnnnnnnnnnnnnnnnnnnnnnnnnnnnnnnnnnnnnnnnnnnnnnnnnnnnnnnnnnnnnnnnnnnnnnnnnnnnnnnnnnnnnnnnnnnnnnnnnnnnnnnnnnnnnnnnnnnnnnnnnnnnnnnnnnnnnnnnnnnnnnnnnnnnnnnnnnnnnnnnnnnnnnnnnnnnnnnnnnnnnnnnnnnnnnnnnnnnnnnnnnnnnnnnnnnnnnnnnnnnnnnnnnnnnnnnnnnnnnnnnnnnnnnnnnnnnnnnnnnnnnnnnnnnnnnnnnnnnnnnnnnnnnnnnnnnnnnnnnnnnnnnnnnnnnnnnnnnnnnnnnnnnnnnnnnnnnnnnnnnnnnnnnnnnnnnnnnnnnnnnnnnnnnnnnnnnnnnnnnnnnnnnnnnnnnnnnnnnnnnnnnnnnnnnnnnnnnnnnnnnnnnnnnnnnnnnnnnnnnnnnnnnnnnnnnnnnnnnnnnnnnnnnnnnnnnnnnnnnnnnnnnnnnnnnnnnnnnnnnnnnnnnnnnnnnnnnnnnnnnnnnnnnnnnnnnnnnnnnnnnnnnnnnnnnnnnnnnnnnnnnnnnnnnnnnnnnnnnnnnnnnnnnnnnnnnnnnnnnnnnnnnnnnnnnnnnnnnnnnnnnnnnnnnnnnnnnnnnnnnnnnnnnnnnnnnnnnnnnnnnnnnnnnnnnnnnnnnnnnnnnnnnnnnnnnnnnnnnnnnnnnnnnnnnnnnnnnnnnnnnnnnnnnnnnnnnnnnnnnnnnnnnnnnnnnnnnnnnnnnnnnnnnnnnnnnnnnnnnnnnnnnnnnnnnnnnnnnnnnnnnnnnnnnnnnnnnnnnnnnnnnnnnnnnnnnnnnnnnnnnnnnnnnnnnnnnnnnnnnnnnnnnnnnnnnnnnnnnnnnnnnnnnnnnnnnnnnnnnnnnnnnnnnnnnnnnnnnnnnnnnnnnnnnnnnnnnnnnnnnnnnnnnnnnnnnnnnnnnnnnnnnnnnnnnnnnnnnnnnnnnnnnnnnnnnnnnnnnnnnnnnnnnnnnnnnnnnnnnnnnnnnnnnnnnnnnnnnnnnnnnnnnnnnnnnnnnnnnnnnnnnnnnnnnnnnnnnnnnnnnnnnnnnnnnnnnnnnnnnnnnnnnnnnnnnnnnnnnnnnnnnnnnnnnnnnnnnnnnnnnnnnnnnnnnnnnnnnnnnnnnnnnnnnnnnnnnnnnnnnnnnnnnnnnnnnnnnnnnnnnnnnnnnnnnnnnnnnnnnnnnnnnnnnnnnnnnnnnnnnnnnnnnnnnnnnnnnnnnnnnnnnnnnnnnnnnnnnnnnnnnnnnnnnnnnnnnnnnnnnnnnnnnnnnnnnnnnnnnnnnnnnnnnnnnnnnnnnnnnnnnnnnnnnnnnnnnnnnnnnnnnnnnnnnnnnnnnnnnnnnnnnnnnnnnnnnnnnnnnnnnnnnnnnnnnnnnnnnnnnnnnnnnnnnnnnnnnnnnnnnnnnnnnnnnnnnnnnnnnnnnnnnnnnnnnnnnnnnnnnnnnnnnnnnnnnnnnnnnnnnnnnnnnnnnnnnnnnnnnnnnnnnnnnnnnnnnnnnnnnnnnnnnnnnnnnnnnnnnnnnnnnnnnnnnnnnnnnnnnnnnnnnnnnnnnnnnnnnnnnnnnnnnnnnnnnnnnnnnnnnnnnnnnnnnnnnnnnnnnnnnnnnnnnnnnnnnnnnnnnnnnnnnnnnnnnnnnnnnnnnnnnnnnnnnnnnnnnnnnnnnnnnnnnnnnnnnnnnnnnnnnnnnnnnnnnnnnnnnnnnnnnnnnnnnnnnnnnnnnnnnnnnnnnnnnnnnnnnnnnnnnnnnnnnnnnnnnnnnnnnnnnnnnnnnnnnnnnnnnnnnnnnnnnnnnnnnnnnnnnnnnnnnnnnnnnnnnnnnnnnnnnnnnnnnnnnnnnnnnnnnnnnnnnnnnnnnnnnnnnnnnnnnnnnnnnnnnnnnnnnnnnnnnnnnnnnnnnnnnnnnnnnnnnnnnnnnnnnnnnnnnnnnnnnnnnnnnnnnnnnnnnnnnnnnnnnnnnnnnnnnnnnnnnnnnnnnnnnnnnnnnnnnnnnnnnnnnnnnnnnnnnnnnnnnnnnnnnnnnnnnnnnnnnnnnnnnnnnnnnnnnnnnnnnnnnnnnnnnnnnnnnnnnnnnnnnnnnnnnnnnnnnnnnnnnnnnnnnnnnnnnnnnnnnnnnnnnnnnnnnnnnnnnnnnnnnnnnnnnnnnnnnnnnnnnnnnnnnnnnnnnnnnnnnnnnnnnnnnnnnnnnnnnnnnnnnnnnnnnnnnnnnnnnnnnnnnnnnnnnnnnnnnnnnnnnnnnnnnnnnnnnnnnnnnnnnnnnnnnnnnnnnnnnnnnnnnnnnnnnnnnnnnnnnnnnnnnnnnnnnnnnnnnnnnnnnnnnnnnnnnnnnnnnnnnnnnnnnnnnnnnnnnnnnnnnnnnnnnnnnnnnnnnnnnnnnnnnnnnnnnnnnnnnnnnnnnnnnnnnnnnnnnnnnnnnnnnnnnnnnnnnnnnnnnnnnnnnnnnnnnnnnnnnnnnnnnnnnnnnnnnnnnnnnnnnnnnnnnnnnnnnnnnnnnnnnnnnnnnnnnnnnnnnnnnnnnnnnnnnnnnnnnnnnnnnnnnnnnnnnnnnnnnnnnnnnnnnnnnnnnnnnnnnnnnnnnnnnnnnnnnnnnnnnnnnnnnnnnnnnnnnnnnnnnnnnnnnnnnnnnnnnnnnnnnnnnnnnnnnnnnnnnnnnnnnnnnnnnnnnnnnnnnnnnnnnnnnnnnnnnnnnnnnnnnnnnnnnnnnnnnnnnnnnnnnnnnnnnnnnnnnnnnnnnnnnnnnnnnnnnnnnnnnnnnnnnnnnnnnnnnnnnnnnnnnnnnnnnnnnnnnnnnnnnnnnnnnnnnnnnnnnnnnnnnnnnnnnnnnnnnnnnnnnnnnnnnnnnnnnnnnnnnnnnnnnnnnnnnnnnnnnnnnnnnnnnnnnnnnnnnnnnnnnnnnnnnnnnnnnnnnnnnnnnnnnnnnnnnnnnnnnnnnnnnnnnnnnnnnnnnnnnnnnnnnnnnnnnnnnnnnnnnnnnnnnnnnnnnnnnnnnnnnnnnnnnnnnnnnnnnnnnnnnnnnnnnnnnnnnnnnnnnnnnnnnnnnnnnnnnnnnnnnnnnnnnnnnnnnnnnnnnnnnnnnnnnnnnnnnnnnnnnnnnnnnnnnnnnnnnnnnnnnnnnnnnnnnnnnnnnnnnnnnnnnnnnnnnnnnnnnnnnnnnnnnnnnnnnnnnnnnnnnnnnnnnnnnnnnnnnnnnnnnnnnnnnnnnnnnnnnnnnnnnnnnnnnnnnnnnnnnnnnnnnnnnnnnnnnnnnnnnnnnnnnnnnnnnnnnnnnnnnnnnnnnnnnnnnnnnnnnnnnnnnnnnnnnnnnnnnnnnnnnnnnnnnnnnnnnnnnnnnnnnnnnnnnnnnnnnnnnnnnnnnnnnnnnnnnnnnnnnnnnnnnnnnnnnnnnnnnnnnnnnnnnnnnnnnnnnnnnnnnnnnnnnnnnnnnnnnnnnnnnnnnnnnnnnnnnnnnnnnnnnnnnnnnnnnnnnnnnnnnnnnnnnnnnnnnnnnnnnnnnnnnnnnnnnnnnnnnnnnnnnnnnnnnnnnnnnnnnnnnnnnnnnnnnnnnnnnnnnnnnnnnnnnnnnnnnnnnnnnnnnnnnnnnnnnnnnnnnnnnnnnnnnnnnnnnnnnnnnnnnnnnnnnnnnnnnnnnnnnnnnnnnnnnnnnnnnnnnnnnnnnnnnnnnnnnnnnnnnnnnnnnnnnnnnnnnnnnnnnnnnnnnnnnnnnnnnnnnnnnnnnnnnnnnnnnnnnnnnnnnnnnnnnnnnnnnnnnnnnnnnnnnnnnnnnnnnnnnnnnnnnnnnnnnnnnnnnnnnnnnnnnnnnnnnnnnnnnnnnnnnnnnnnnnnnnnnnnnnnnnnnnnnnnnnnnnnnnnnnnnnnnnnnnnnnnnnnnnnnnnnnnnnnnnnnnnnnnnnnnnnnnnnnnnnnnnnnnnnnnnnnnnnnnnnnnnnnnnnnnnnnnnnnnnnnnnnnnnnnnnnnnnnnnnnnnnnnnnnnnnnnnnnnnnnnnnnnnnnnnnnnnnnnnnnnnnnnnnnnnnnnnnnnnnnnnnnnnnnnnnnnnnnnnnnnnnnnnnnnnnnnnnnnnnnnnnnnnnnnnnnnnnnnnnnnnnnnnnnnnnnnnnnnnnnnnnnnnnnnnnnnnnnnnnnnnnnnnnnnnnnnnnnnnnnnnnnnnnnnnnnnnnnnnnnnnnnnnnnnnnnnnnnnnnnnnnnnnnnnnnnnnnnnnnnnnnnnnnnnnnnnnnnnnnnnnnnnnnnnnnnnnnnnnnnnnnnnnnnnnnnnnnnnnnnnnnnnnnnnnnnnnnnnnnnnnnnnnnnnnnnnnnnnnnnnnnnnnnnnnnnnnnnnnnnnnnnnnnnnnnnnnnnnnnnnnnnnnnnnnnnnnnnnnnnnnnnnnnnnnnnnnnnnnnnnnnnnnnnnnnnnnnnnnnnnnnnnnnnnnnnnnnnnnnnnnnnnnnnnnnnnnnnnnnnnnnnnnnnnnnnnnnnnnnnnnnnnnnnnnnnnnnnnnnnnnnnnnnnnnnnnnnnnnnnnnnnnnnnnnnnnnnnnnnnnnnnnnnnnnnnnnnnnnnnnnnnnnnnnnnnnnnnnnnnnnnnnnnnnnnnnnnnnnnnnnnnnnnnnnnnnnnnnnnnnnnnnnnnnnnnnnnnnnnnnnnnnnnnnnnnnnnnnnnnnnnnnnnnnnnnnnnnnnnnnnnnnnnnnnnnnnnnnnnnnnnnnnnnnnnnnnnnnnnnnnnnnnnnnnnnnnnnnnnnnnnnnnnnnnnnnnnnnnnnnnnnnnnnnnnnnnnnnnnnnnnnnnnnnnnnnnnnnnnnnnnnnnnnnnnnnnnnnnnnnnnnnnnnnnnnnnnnnnnnnnnnnnnnnnnnnnnnnnnnnnnnnnnnnnnnnnnnnnnnnnnnnnnnnnnnnnnnnnnnnnnnnnnnnnnnnnnnnnnnnnnnnnnnnnnnnnnnnnnnnnnnnnnnnnnnnnnnnnnnnnnnnnnnnnnnnnnnnnnnnnnnnnnnnnnnnnnnnnnnnnnnnnnnnnnnnnnnnnnnnnnnnnnnnnnnnnnnnnnnnnnnnnnnnnnnnnnnnnnnnnnnnnnnnnnnnnnnnnnnnnnnnnnnnnnnnnnnnnnnnnnnnnnnnnnnnnnnnnnnnnnnnnnnnnnnnnnnnnnnnnnnnnnnnnnnnnnnnnnnnnnnnnnnnnnnnnnnnnnnnnnnnnnnnnnnnnnnnnnnnnnnnnnnnnnnnnnnnnnnnnnnnnnnnnnnnnnnnnnnnnnnnnnnnnnnnnnnnnnnnnnnnnnnnnnnnnnnnnnnnnnnnnnnnnnnnnnnnnnnnnnnnnnnnnnnnnnnnnnnnnnnnnnnnnnnnnnnnnnnnnnnnnnnnnnnnnnnnnnnnnnnnnnnnnnnnnnnnnnnnnnnnnnnnnnnnnnnnnnnnnnnnnnnnnnnnnnnnnnnnnnnnnnnnnnnnnnnnnnnnnnnnnnnnnnnnnnnnnnnnnnnnnnnnnnnnnnnnnnnnnnnnnnnnnnnnnnnnnnnnnnnnnnnnnnnnnnnnnnnnnnnnnnnnnnnnnnnnnnnnnnnnnnnnnnnnnnnnnnnnnnnnnnnnnnnnnnnnnnnnnnnnnnnnnnnnnnnnnnnnnnnnnnnnnnnnnnnnnnnnnnnnnnnnnnnnnnnnnnnnnnnnnnnnnnnnnnnnnnnnnnnnnnnnnnnnnnnnnnnnnnnnnnnnnnnnnnnnnnnnnnnnnnnnnnnnnnnnnnnnnnnnnnnnnnnnnnnnnnnnnnnnnnnnnnnnnnnnnnnnnnnnnnnnnnnnnnnnnnnnnnnnnnnnnnnnnnnnnnnnnnnnnnnnnnnnnnnnnnnnnnnnnnnnnnnnnnnnnnnnnnnnnnnnnnnnnnnnnnnnnnnnnnnnnnnnnnnnnnnnnnnnnnnnnnnnnnnnnnnnnnnnnnnnnnnnnnnnnnnnnnnnnnnnnnnnnnnnnnnnnnnnnnnnnnnnnnnnnnnnnnnnnnnnnnnnnnnnnnnnnnnnnnnnnnnnnnnnnnnnnnnnnnnnnnnnnnnnnnnnnnnnnnnnnnnnnnnnnnnnnnnnnnnnnnnnnnnnnnnnnnnnnnnnnnnnnnnnnnnnnnnnnnnnnnnnnnnnnnnnnnnnnnnnnnnnnnnnnnnnnnnnnnnnnnnnnnnnnnnnnnnnnnnnnnnnnnnnnnnnnnnnnnnnnnnnnnnnnnnnnnnnnnnnnnnnnnnnnnnnnnnnnnnnnnnnnnnnnnnnnnnnnnnnnnnnnnnnnnnnnnnnnnnnnnnnnnnnnnnnnnnnnnnnnnnnnnnnnnnnnnnnnnnnnnnnnnnnnnnnnnnnnnnnnnnnnnnnnnnnnnnnnnnnnnnnnnnnnnnnnnnnnnnnnnnnnnnnnnnnnnnnnnnnnnnnnnnnnnnnnnnnnnnnnnnnnnnnnnnnnnnnnnnnnnnnnnnnnnnnnnnnnnnnnnnnnnnnnnnnnnnnnnnnnnnnnnnnnnnnnnnnnnnnnnnnnnnnnnnnnnnnnnnnnnnnnnnnnnnnnnnnnnnnnnnnnnnnnnnnnnnnnnnnnnnnnnnnnnnnnnnnnnnnnnnnnnnnnnnnnnnnnnnnnnnnnnnnnnnnnnnnnnnnnnnnnnnnnnnnnnnnnnnnnnnnnnnnnnnnnnnnnnnnnnnnnnnnnnnnnnnnnnnnnnnnnnnnnnnnnnnnnnnnnnnnnnnnnnnnnnnnnnnnnnnnnnnnnnnnnnnnnnnnnnnnnnnnnnnnnnnnnnnnnnnnnnnnnnnnnnnnnnnnnnnnnnnnnnnnnnnnnnnnnnnnnnnnnnnnnnnnnnnnnnnnnnnnnnnnnnnnnnnnnnnnnnnnnnnnnnnnnnnnnnnnnnnnnnnnnnnnnnnnnnnnnnnnnnnnnnnnnnnnnnnnnnnnnnnnnnnnnnnnnnnnnnnnnnnnnnnnnnnnnnnnnnnnnnnnnnnnnnnnnnnnnnnnnnnnnnnnnnnnnnnnnnnnnnnnnnnnnnnnnnnnnnnnnnnnnnnnnnnnnnnnnnnnnnnnnnnnnnnnnnnnnnnnnnnnnnnnnnnnnnnnnnnnnnnnnnnnnnnnnnnnnnnnnnnnnnnnnnnnnnnnnnnnnnnnnnnnnnnnnnnnnnnnnnnnnnnnnnnnnnnnnnnnnnnnnnnnnnnnnnnnnnnnnnnnnnnnnnnnnnnnnnnnnnnnnnnnnnnnnnnnnnnnnnnnnnnnnnnnnnnnnnnnnnnnnnnnnnnnnnnnnnnnnnnnnnnnnnnnnnnnnnnnnnnnnnnnnnnnnnnnnnnnnnnnnnnnnnnnnnnnnnnnnnnnnnnnnnnnnnnnnnnnnnnnnnnnnnnnnnnnnnnnnnnnnnnnnnnnnnnnnnnnnnnnnnnnnnnnnnnnnnnnnnnnnnnnnnnnnnnnnnnnnnnnnnnnnnnnnnnnnnnnnnnnnnnnnnnnnnnnnnnnnnnnnnnnnnnnnnnnnnnnnnnnnnnnnnnnnnnnnnnnnnnnnnnnnnnnnnnnnnnnnnnnnnnnnnnnnnnnnnnnnnnnnnnnnnnnnnnnnnnnnnnnnnnnnnnnnnnnnnnnnnnnnnnnnnnnnnnnnnnnnnnnnnnnnnnnnnnnnnnnnnnnnnnnnnnnnnnnnnnnnnnnnnnnnnnnnnnnnnnnnnnnnnnnnnnnnnnnnnnnnnnnnnnnnnnnnnnnnnnnnnnnnnnnnnnnnnnnnnnnnnnnnnnnnnnnnnnnnnnnnnnnnnnnnnnnnnnnnnnnnnnnnnnnnnnnnnnnnnnnnnnnnnnnnnnnnnnnnnnnnnnnnnnnnnnnnnnnnnnnnnnnnnnnnnnnnnnnnnnnnnnnnnnnnnnnnnnnnnnnnnnnnnnnnnnnnnnnnnnnnnnnnnnnnnnnnnnnnnnnnnnnnnnnnnnnnnnnnnnnnnnnnnnnnnnnnnnnnnnnnnnnnnnnnnnnnnnnnnnnnnnnnnnnnnnnnnnnnnnnnnnnnnnnnnnnnnnnnnnnnnnnnnnnnnnnnnnnnnnnnnnnnnnnnnnnnnnnnnnnnnnnnnnnnnnnnnnnnnnnnnnnnnnnnnnnnnnnnnnnnnnnnnnnnnnnnnnnnnnnnnnnnnnnnnnnnnnnnnnnnnnnnnnnnnnnnnnnnnnnnnnnnnnnnnnnnnnnnnnnnnnnnnnnnnnnnnnnnnnnnnnnnnnnnnnnnnnnnnnnnnnnnnnnnnnnnnnnnnnnnnnnnnnnnnnnnnnnnnnnnnnnnnnnnnnnnnnnnnnnnnnnnnnnnnnnnnnnnnnnnnnnnnnnnnnnnnnnnnnnnnnnnnnnnnnnnnnnnnnnnnnnnnnnnnnnnnnnnnnnnnnnnnnnnnnnnnnnnnnnnnnnnnnnnnnnnnnnnnnnnnnnnnnnnnnnnnnnnnnnnnnnnnnnnnnnnnnnnnnnnnnnnnnnnnnnnnnnnnnnnnnnnnnnnnnnnnnnnnnnnnnnnnnnnnnnnnnnnnnnnnnnnnnnnnnnnnnnnnnnnnnnnnnnnnnnnnnnnnnnnnnnnnnnnnnnnnnnnnnnnnnnnnnnnnnnnnnnnnnnnnnnnnnnnnnnnnnnnnnnnnnnnnnnnnnnnnnnnnnnnnnnnnnnnnnnnnnnnnnnnnnnnnnnnnnnnnnnnnnnnnnnnnnnnnnnnnnnnnnnnnnnnnnnnnnnnnnnnnnnnnnnnnnnnnnnnnnnnnnnnnnnnnnnnnnnnnnnnnnnnnnnnnnnnnnnnnnnnnnnnnnnnnnnnnnnnnnnnnnnnnnnnnnnnnnnnnnnnnnnnnnnnnnnnnnnnnnnnnnnnnnnnnnnnnnnnnnnnnnnnnnnnnnnnnnnnnnnnnnnnnnnnnnnnnnnnnnnnnnnnnnnnnnnnnnnnnnnnnnnnnnnnnnnnnnnnnnnnnnnnnnnnnnnnnnnnnnnnnnnnnnnnnnnnnnnnnnnnnnnnnnnnnnnnnnnnnnnnnnnnnnnnnnnnnnnnnnnnnnnnnnnnnnnnnnnnnnnnnnnnnnnnnnnnnnnnnnnnnnnnnnnnnnnnnnnnnnnnnnnnnnnnnnnnnnnnnnnnnnnnnnnnnnnnnnnnnnnnnnnnnnnnnnnnnnnnnnnnnnnnnnnnnnnnnnnnnnnnnnnnnnnnnnnnnnnnnnnnnnnnnnnnnnnnnnnnnnnnnnnnnnnnnnnnnnnnnnnnnnnnnnnnnnnnnnnnnnnnnnnnnnnnnnnnnnnnnnnnnnnnnnnnnnnnnnnnnnnnnnnnnnnnnnnnnnnnnnnnnnnnnnnnnnnnnnnnnnnnnnnnnnnnnnnnnnnnnnnnnnnnnnnnnnnnnnnnnnnnnnnnnnnnnnnnnnnnnnnnnnnnnnnnnnnnnnnnnnnnnnnnnnnnnnnnnnnnnnnnnnnnnnnnnnnnnnnnnnnnnnnnnnnnnnnnnnnnnnnnnnnnnnnnnnnnnnnnnnnnnnnnnnnnnnnnnnnnnnnnnnnnnnnnnnnnnnnnnnnnnnnnnnnnnnnnnnnnnnnnnnnnnnnnnnnnnnnnnnnnnnnnnnnnnnnnnnnnnnnnnnnnnnnnnnnnnnnnnnnnnnnnnnnnnnnnnnnnnnnnnnnnnnnnnnnnnnnnnnnnnnnnnnnnnnnnnnnnnnnnnnnnnnnnnnnnnnnnnnnnnnnnnnnnnnnnnnnnnnnnnnnnnnnnnnnnnnnnnnnnnnnnnnnnnnnnnnnnnnnnnnnnnnnnnnnnnnnnnnnnnnnnnnnnnnnnnnnnnnnnnnnnnnnnnnnnnnnnnnnnnnnnnnnnnnnnnnnnnnnnnnnnnnnnnnnnnnnnnnnnnnnnnnnnnnnnnnnnnnnnnnnnnnnnnnnnnnnnnnnnnnnnnnnnnnnnnnnnnnnnnnnnnnnnnnnnnnnnnnnnnnnnnnnnnnnnnnnnnnnnnnnnnnnnnnnnnnnnnnnnnnnnnnnnnnnnnnnnnnnnnnnnnnnnnnnnnnnnnnnnnnnnnnnnnnnnnnnnnnnnnnnnnnnnnnnnnnnnnnnnnnnnnnnnnnnnnnnnnnnnnnnnnnnnnnnnnnnnnnnnnnnnnnnnnnnnnnnnnnnnnnnnnnnnnnnnnnnnnnnnnnnnnnnnnnnnnnnnnnnnnnnnnnnnnnnnnnnnnnnnnnnnnnnnnnnnnnnnnnnnnnnnnnnnnnnnnnnnnnnnnnnnnnnnnnnnnnnnnnnnnnnnnnnnnnnnnnnnnnnnnnnnnnnnnnnnnnnnnnnnnnnnnnnnnnnnnnnnnnnnnnnnnnnnnnnnnnnnnnnnnnnnnnnnnnnnnnnnnnnnnnnnnnnnnnnnnnnnnnnnnnnnnnnnnnnnnnnnnnnnnnnnnnnnnnnnnnnnnnnnnnnnnnnnnnnnnnnnnnnnnnnnnnnnnnnnnnnnnnnnnnnnnnnnnnnnnnnnnnnnnnnnnnnnnnnnnnnnnnnnnnnnnnnnnnnnnnnnnnnnnnnnnnnnnnnnnnnnnnnnnnnnnnnnnnnnnnnnnnnnnnnnnnnnnnnnnnnnnnnnnnnnnnnnnnnnnnnnnnnnnnnnnnnnnnnnnnnnnnnnnnnnnnnnnnnnnnnnnnnnnnnnnnnnnnnnnnnnnnnnnnnnnnnnnnnnnnnnnnnnnnnnnnnnnnnnnnnnnnnnnnnnnnnnnnnnnnnnnnnnnnnnnnnnnnnnnnnnnnnnnnnnnnnnnnnnnnnnnnnnnnnnnnnnnnnnnnnnnnnnnnnnnnnnnnnnnnnnnnnnnnnnnnnnnnnnnnnnnnnnnnnnnnnnnnnnnnnnnnnnnnnnnnnnnnnnnnnnnnnnnnnnnnnnnnnnnnnnnnnnnnnnnnnnnnnnnnnnnnnnnnnnnnnnnnnnnnnnnnnnnnnnnnnnnnnnnnnnnnnnnnnnnnnnnnnnnnnnnnnnnnnnnnnnnnnnnnnnnnnnnnnnnnnnnnnnnnnnnnnnnnnnnnnnnnnnnnnnnnnnnnnnnnnnnnnnnnnnnnnnnnnnnnnnnnnnnnnnnnnnnnnnnnnnnnnnnnnnnnnnnnnnnnnnnnnnnnnnnnnnnnnnnnnnnnnnnnnnnnnnnnnnnnnnnnnnnnnnnnnnnnnnnnnnnnnnnnnnnnnnnnnnnnnnnnnnnnnnnnnnnnnnnnnnnnnnnnnnnnnnnnnnnnnnnnnnnnnnnnnnnnnnnnnnnnnnnnnnnnnnnnnnnnnnnnnnnnnnnnnnnnnnnnnnnnnnnnnnnnnnnnnnnnnnnnnnnnnnnnnnnnnnnnnnnnnnnnnnnnnnnnnnnnnnnnnnnnnnnnnnnnnnnnnnnnnnnnnnnnnnnnnnnnnnnnnnnnnnnnnnnnnnnnnnnnnnnnnnnnnnnnnnnnnnnnnnnnnnnnnnnnnnnnnnnnnnnnnnnnnnnnnnnnnnnnnnnnnnnnnnnnnnnnnnnnnnnnnnnnnnnnnnnnnnnnnnnnnnnnnnnnnnnnnnnnnnnnnnnnnnnnnnnnnnnnnnnnnnnnnnnnnnnnnnnnnnnnnnnnnnnnnnnnnnnnnnnnnnnnnnnnnnnnnnnnnnnnnnnnnnnnnnnnnnnnnnnnnnnnnnnnnnnnnnnnnnnnnnnnnnnnnnnnnnnnnnnnnnnnnnnnnnnnnnnnnnnnnnnnnnnnnnnnnnnnnnnnnnnnnnnnnnnnnnnnnnnnnnnnnnnnnnnnnnnnnnnnnnnnnnnnnnnnnnnnnnnnnnnnnnnnnnnnnnnnnnnnnnnnnnnnnnnnnnnnnnnnnnnnnnnnnnnnnnnnnnnnnnnnnnnnnnnnnnnnnnnnnnnnnnnnnnnnnnnnnnnnnnnnnnnnnnnnnnnnnnnnnnnnnnnnnnnnnnnnnnnnnnnnnnnnnnnnnnnnnnnnnnnnnnnnnnnnnnnnnnnnnnnnnnnnnnnnnnnnnnnnnnnnnnnnnnnnnnnnnnnnnnnnnnnnnnnnnnnnnnnnnnnnnnnnnnnnnnnnnnnnnnnnnnnnnnnnnnnnnnnnnnnnnnnnnnnnnnnnnnnnnnnnnnnnnnnnnnnnnnnnnnnnnnnnnnnnnnnnnnnnnnnnnnnnnnnnnnnnnnnnnnnnnnnnnnnnnnnnnnnnnnnnnnnnnnnnnnnnnnnnnnnnnnnnnnnnnnnnnnnnnnnnnnnnnnnnnnnnnnnnnnnnnnnnnnnnnnnnnnnnnnnnnnnnnnnnnnnnnnnnnnnnnnnnnnnnnnnnnnnnnnnnnnnnnnnnnnnnnnnnnnnnnnnnnnnnnnnnnnnnnnnnnnnnnnnnnnnnnnnnnnnnnnnnnnnnnnnnnnnnnnnnnnnnnnnnnnnnnnnnnnnnnnnnnnnnnnnnnnnnnnnnnnnnnnnnnnnnnnnnnnnnnnnnnnnnnnnnnnnnnnnnnnnnnnnnnnnnnnnnnnnnnnnnnnnnnnnnnnnnnnnnnnnnnnnnnnnnnnnnnnnnnnnnnnnnnnnnnnnnnnnnnnnnnnnnnnnnnnnnnnnnnnnnnnnnnnnnnnnnnnnnnnnnnnnnnnnnnnnnnnnnnnnnnnnnnnnnnnnnnnnnnnnnnnnnnnnnnnnnnnnnnnnnnnnnnnnnnnnnnnnnnnnnnnnnnnnnnnnnnnnnnnnnnnnnnnnnnnnnnnnnnnnnnnnnnnnnnnnnnnnnnnnnnnnnnnnnnnnnnnnnnnnnnnnnnnnnnnnnnnnnnnnnnnnnnnnnnnnnnnnnnnnnnnnnnnnnnnnnnnnnnnnnnnnnnnnnnnnnnnnnnnnnnnnnnnnnnnnnnnnnnnnnnnnnnnnnnnnnnnnnnnnnnnnnnnnnnnnnnnnnnnnnnnnnnnnnnnnnnnnnnnnnnnnnnnnnnnnnnnnnnnnnnnnnnnnnnnnnnnnnnnnnnnnnnnnnnnnnnnnnnnnnnnnnnnnnnnnnnnnnnnnnnnnnnnnnnnnnnnnnnnnnnnnnnnnnnnnnnnnnnnnnnnnnnnnnnnnnnnnnnnnnnnnnnnnnnnnnnnnnnnnnnnnnnnnnnnnnnnnnnnnnnnnnnnnnnnnnnnnnnnnnnnnnnnnnnnnnnnnnnnnnnnnnnnnnnnnnnnnnnnnnnnnnnnnnnnnnnnnnnnnnnnnnnnnnnnnnnnnnnnnnnnnnnnnnnnnnnnnnnnnnnnnnnnnnnnnnnnnnnnnnnnnnnnnnnnnnnnnnnnnnnnnnnnnnnnnnnnnnnnnnnnnnnnnnnnnnnnnnnnnnnnnnnnnnnnnnnnnnnnnnnnnnnnnnnnnnnnnnnnnnnnnnnnnnnnnnnnnnnnnnnnnnnnnnnnnnnnnnnnnnnnnnnnnnnnnnnnnnnnnnnnnnnnnnnnnnnnnnnnnnnnnnnnnnnnnnnnnnnnnnnnnnnnnnnnnnnnnnnnnnnnnnnnnnnnnnnnnnnnnnnnnnnnnnnnnnnnnnnnnnnnnnnnnnnnnnnnnnnnnnnnnnnnnnnnnnnnnnnnnnnnnnnnnnnnnnnnnnnnnnnnnnnnnnnnnnnnnnnnnnnnnnnnnnnnnnnnnnnnnnnnnnnnnnnnnnnnnnnnnnnnnnnnnnnnnnnnnnnnnnnnnnnnnnnnnnnnnnnnnnnnnnnnnnnnnnnnnnnnnnnnnnnnnnnnnnnnnnnnnnnnnnnnnnnnnnnnnnnnnnnnnnnnnnnnnnnnnnnnnnnnnnnnnnnnnnnnnnnnnnnnnnnnnnnnnnnnnnnnnnnnnnnnnnnnnnnnnnnnnnnnnnnnnnnnnnnnnnnnnnnnnnnnnnnnnnnnnnnnnnnnnnnnnnnnnnnnnnnnnnnnnnnnnnnnnnnnnnnnnnnnnnnnnnnnnnnnnnnnnnnnnnnnnnnnnnnnnnnnnnnnnnnnnnnnnnnnnnnnnnnnnnnnnnnnnnnnnnnnnnnnnnnnnnnnnnnnnnnnnnnnnnnnnnnnnnnnnnnnnnnnnnnnnnnnnnnnnnnnnnnnnnnnnnnnnnnnnnnnnnnnnnnnnnnnnnnnnnnnnnnnnnnnnnnnnnnnnnnnnnnnnnnnnnnnnnnnnnnnnnnnnnnnnnnnnnnnnnnnnnnnnnnnnnnnnnnnnnnnnnnnnnnnnnnnnnnnnnnnnnnnnnnnnnnnnnnnnnnnnnnnnnnnnnnnnnnnnnnnnnnnnnnnnnnnnnnnnnnnnnnnnnnnnnnnnnnnnnnnnnnnnnnnnnnnnnnnnnnnnnnnnnnnnnnnnnnnnnnnnnnnnnnnnnnnnnnnnnnnnnnnnnnnnnnnnnnnnnnnnnnnnnnnnnnnnnnnnnnnnnnnnnnnnnnnnnnnnnnnnnnnnnnnnnnnnnnnnnnnnnnnnnnnnnnnnnnnnnnnnnnnnnnnnnnnnnnnnnnnnnnnnnnnnnnnnnnnnnnnnnnnnnnnnnnnnnnnnnnnnnnnnnnnnnnnnnnnnnnnnnnnnnnnnnnnnnnnnnnnnnnnnnnnnnnnnnnnnnnnnnnnnnnnnnnnnnnnnnnnnnnnnnnnnnnnnnnnnnnnnnnnnnnnnnnnnnnnnnnnnnnnnnnnnnnnnnnnnnnnnnnnnnnnnnnnnnnnnnnnnnnnnnnnnnnnnnnnnnnnnnnnnnnnnnnnnnnnnnnnnnnnnnnnnnnnnnnnnnnnnnnnnnnnnnnnnnnnnnnnnnnnnnnnnnnnnnnnnnnnnnnnnnnnnnnnnnnnnnnnnnnnnnnnnnnnnnnnnnnnnnnnnnnnnnnnnnnnnnnnnnnnnnnnnnnnnnnnnnnnnnnnnnnnnnnnnnnnnnnnnnnnnnnnnnnnnnnnnnnnnnnnnnnnnnnnnnnnnnnnnnnnnnnnnnnnnnnnnnnnnnnnnnnnnnnnnnnnnnnnnnnnnnnnnnnnnnnnnnnnnnnnnnnnnnnnnnnnnnnnnnnnnnnnnnnnnnnnnnnnnnnnnnnnnnnnnnnnnnnnnnnnnnnnnnnnnnnnnnnnnnnnnnnnnnnnnnnnnnnnnnnnnnnnnnnnnnnnnnnnnnnnnnnnnnnnnnnnnnnnnnnnnnnnnnnnnnnnnnnnnnnnnnnnnnnnnnnnnnnnnnnnnnnnnnnnnnnnnnnnnnnnnnnnnnnnnnnnnnnnnnnnnnnnnnnnnnnnnnnnnnnnnnnnnnnnnnnnnnnnnnnnnnnnnnnnnnnnnnnnnnnnnnnnnnnnnnnnnnnnnnnnnnnnnnnnnnnnnnnnnnnnnnnnnnnnnnnnnnnnnnnnnnnnnnnnnnnnnnnnnnnnnnnnnnnnnnnnnnnnnnnnnnnnnnnnnnnnnnnnnnnnnnnnnnnnnnnnnnnnnnnnnnnnnnnnnnnnnnnnnnnnnnnnnnnnnnnnnnnnnnnnnnnnnnnnnnnnnnnnnnnnnnnnnnnnnnnnnnnnnnnnnnnnnnnnnnnnnnnnnnnnnnnnnnnnnnnnnnnnnnnnnnnnnnnnnnnnnnnnnnnnnnnnnnnnnnnnnnnnnnnnnnnnnnnnnnnnnnnnnnnnnnnnnnnnnnnnnnnnnnnnnnnnnnnnnnnnnnnnnnnnnnnnnnnnnnnnnnnnnnnnnnnnnnnnnnnnnnnnnnnnnnnnnnnnnnnnnnnnnnnnnnnnnnnnnnnnnnnnnnnnnnnnnnnnnnnnnnnnnnnnnnnnnnnnnnnnnnnnnnnnnnnnnnnnnnnnnnnnnnnnnnnnnnnnnnnnnnnnnnnnnnnnnnnnnnnnnnnnnnnnnnnnnnnnnnnnnnnnnnnnnnnnnnnnnnnnnnnnnnnnnnnnnnnnnnnnnnnnnnnnnnnnnnnnnnnnnnnnnnnnnnnnnnnnnnnnnnnnnnnnnnnnnnnnnnnnnnnnnnnnnnnnnnnnnnnnnnnnnnnnnnnnnnnnnnnnnnnnnnnnnnnnnnnnnnnnnnnnnnnnnnnnnnnnnnnnnnnnnnnnnnnnnnnnnnnnnnnnnnnnnnnnnnnnnnnnnnnnnnnnnnnnnnnnnnnnnnnnnnnnnnnnnnnnnnnnnnnnnnnnnnnnnnnnnnnnnnnnnnnnnnnnnnnnnnnnnnnnnnnnnnnnnnnnnnnnnnnnnnnnnnnnnnnnnnnnnnnnnnnnnnnnnnnnnnnnnnnnnnnnnnnnnnnnnnnnnnnnnnnnnnnnnnnnnnnnnnnnnnnnnnnnnnnnnnnnnnnnnnnnnnnnnnnnnnnnnnnnnnnnnnnnnnnnnnnnnnnnnnnnnnnnnnnnnnnnnnnnnnnnnnnnnnnnnnnnnnnnnnnnnnnnnnnnnnnnnnnnnnnnnnnnnnnnnnnnnnnnnnnnnnnnnnnnnnnnnnnnnnnnnnnnnnnnnnnnnnnnnnnnnnnnnnnnnnnnnnnnnnnnnnnnnnnnnnnnnnnnnnnnnnnnnnnnnnnnnnnnnnnnnnnnnnnnnnnnnnnnnnnnnnnnnnnnnnnnnnnnnnnnnnnnnnnnnnnnnnnnnnnnnnnnnnnnnnnnnnnnnnnnnnnnnnnnnnnnnnnnnnnnnnnnnnnnnnnnnnnnnnnnnnnnnnnnnnnnnnnnnnnnnnnnnnnnnnnnnnnnnnnnnnnnnnnnnnnnnnnnnnnnnnnnnnnnnnnnnnnnnnnnnnnnnnnnnnnnnnnnnnnnnnnnnnnnnnnnnnnnnnnnnnnnnnnnnnnnnnnnnnnnnnnnnnnnnnnnnnnnnnnnnnnnnnnnnnnnnnnnnnnnnnnnnnnnnnnnnnnnnnnnnnnnnnnnnnnnnnnnnnnnnnnnnnnnnnnnnnnnnnnnnnnnnnnnnnnnnnnnnnnnnnnnnnnnnnnnnnnnnnnnnnnnnnnnnnnnnnnnnnnnnnnnnnnnnnnnnnnnnnnnnnnnnnnnnnnnnnnnnnnnnnnnnnnnnnnnnnnnnnnnnnnnnnnnnnnnnnnnnnnnnnnnnnnnnnnnnnnnnnnnnnnnnnnnnnnnnnnnnnnnnnnnnnnnnnnnnnnnnnnnnnnnnnnnnnnnnnnnnnnnnnnnnnnnnnnnnnnnnnnnnnnnnnnnnnnnnnnnnnnnnnnnnnnnnnnnnnnnnnnnnnnnnnnnnnnnnnnnnnnnnnnnnnnnnnnnnnnnnnnnnnnnnnnnnnnnnnnnnnnnnnnnnnnnnnnnnnnnnnnnnnnnnnnnnnnnnnnnnnnnnnnnnnnnnnnnnnnnnnnnnnnnnnnnnnnnnnnnnnnnnnnnnnnnnnnnnnnnnnnnnnnnnnnnnnnnnnnnnnnnnnnnnnnnnnnnnnnnnnnnnnnnnnnnnnnnnnnnnnnnnnnnnnnnnnnnnnnnnnnnnnnnnnnnnnnnnnnnnnnnnnnnnnnnnnnnnnnnnnnnnnnnnnnnnnnnnnnnnnnnnnnnnnnnnnnnnnnnnnnnnnnnnnnnnnnnnnnnnnnnnnnnnnnnnnnnnnnnnnnnnnnnnnnnnnnnnnnnnnnnnnnnnnnnnnnnnnnnnnnnnnnnnnnnnnnnnnnnnnnnnnnnnnnnnnnnnnnnnnnnnnnnnnnnnnnnnnnnnnnnnnnnnnnnnnnnnnnnnnnnnnnnnnnnnnnnnnnnnnnnnnnnnnnnnnnnnnnnnnnnnnnnnnnnnnnnnnnnnnnnnnnnnnnnnnnnnnnnnnnnnnnnnnnnnnnnnnnnnnnnnnnnnnnnnnnnnnnnnnnnnnnnnnnnnnnnnnnnnnnnnnnnnnnnnnnnnnnnnnnnnnnnnnnnnnnnnnnnnnnnnnnnnnnnnnnnnnnnnnnnnnnnnnnnnnnnnnnnnnnnnnnnnnnnnnnnnnnnnnnnnnnnnnnnnnnnnnnnnnnnnnnnnnnnnnnnnnnnnnnnnnnnnnnnnnnnnnnnnnnnnnnnnnnnnnnnnnnnnnnnnnnnnnnnnnnnnnnnnnnnnnnnnnnnnnnnnnnnnnnnnnnnnnnnnnnnnnnnnnnnnnnnnnnnnnnnnnnnnnnnnnnnnnnnnnnnnnnnnnnnnnnnnnnnnnnnnnnnnnnnnnnnnnnnnnnnnnnnnnnnnnnnnnnnnnnnnnnnnnnnnnnnnnnnnnnnnnnnnnnnnnnnnnnnnnnnnnnnnnnnnnnnnnnnnnnnnnnnnnnnnnnnnnnnnnnnnnnnnnnnnnnnnnnnnnnnnnnnnnnnnnnnnnnnnnnnnnnnnnnnnnnnnnnnnnnnnnnnnnnnnnnnnnnnnnnnnnnnnnnnnnnnnnnnnnnnnnnnnnnnnnnnnnnnnnnnnnnnnnnnnnnnnnnnnnnnnnnnnnnnnnnnnnnnnnnnnnnnnnnnnnnnnnnnnnnnnnnnnnnnnnnnnnnnnnnnnnnnnnnnnnnnnnnnnnnnnnnnnnnnnnnnnnnnnnnnnnnnnnnnnnnnnnnnnnnnnnnnnnnnnnnnnnnnnnnnnnnnnnnnnnnnnnnnnnnnnnnnnnnnnnnnnnnnnnnnnnnnnnnnnnnnnnnnnnnnnnnnnnnnnnnnnnnnnnnnnnnnnnnnnnnnnnnnnnnnnnnnnnnnnnnnnnnnnnnnnnnnnnnnnnnnnnnnnnnnnnnnnnnnnnnnnnnnnnnnnnnnnnnnnnnnnnnnnnnnnnnnnnnnnnnnnnnnnnnnnnnnnnnnnnnnnnnnnnnnnnnnnnnnnnnnnnnnnnnnnnnnnnnnnnnnnnnnnnnnnnnnnnnnnnnnnnnnnnnnnnnnnnnnnnnnnnnnnnnnnnnnnnnnnnnnnnnnnnnnnnnnnnnnnnnnnnnnnnnnnnnnnnnnnnnnnnnnnnnnnnnnnnnnnnnnnnnnnnnnnnnnnnnnnnnnnnnnnnnnnnnnnnnnnnnnnnnnnnnnnnnnnnnnnnnnnnnnnnnnnnnnnnnnnnnnnnnnnnnnnnnnnnnnnnnnnnnnnnnnnnnnnnnnnnnnnnnnnnnnnnnnnnnnnnnnnnnnnnnnnnnnnnnnnnnnnnnnnnnnnnnnnnnnnnnnnnnnnnnnnnnnnnnnnnnnnnnnnnnnnnnnnnnnnnnnnnnnnnnnnnnnnnnnnnnnnnnnnnnnnnnnnnnnnnnnnnnnnnnnnnnnnnnnnnnnnnnnnnnnnnnnnnnnnnnnnnnnnnnnnnnnnnnnnnnnnnnnnnnnnnnnnnnnnnnnnnnnnnnnnnnnnnnnnnnnnnnnnnnnnnnnnnnnnnnnnnnnnnnnnnnnnnnnnnnnnnnnnnnnnnnnnnnnnnnnnnnnnnnnnnnnnnnnnnnnnnnnnnnnnnnnnnnnnnnnnnnnnnnnnnnnnnnnnnnnnnnnnnnnnnnnnnnnnnnnnnnnnnnnnnnnnnnnnnnnnnnnnnnnnnnnnnnnnnnnnnnnnnnnnnnnnnnnnnnnnnnnnnnnnnnnnnnnnnnnnnnnnnnnnnnnnnnnnnnnnnnnnnnnnnnnnnnnnnnnnnnnnnnnnnnnnnnnnnnnnnnnnnnnnnnnnnnnnnnnnnnnnnnnnnnnnnnnnnnnnnnnnnnnnnnnnnnnnnnnnnnnnnnnnnnnnnnnnnnnnnnnnnnnnnnnnnnnnnnnnnnnnnnnnnnnnnnnnnnnnnnnnnnnnnnnnnnnnnnnnnnnnnnnnnnnnnnnnnnnnnnnnnnnnnnnnnnnnnnnnnnnnnnnnnnnnnnnnnnnnnnnnnnnnnnnnnnnnnnnnnnnnnnnnnnnnnnnnnnnnnnnnnnnnnnnnnnnnnnnnnnnnnnnnnnnnnnnnnnnnnnnnnnnnnnnnnnnnnnnnnnnnnnnnnnnnnnnnnnnnnnnnnnnnnnnnnnnnnnnnnnnnnnnnnnnnnnnnnnnnnnnnnnnnnnnnnnnnnnnnnnnnnnnnnnnnnnnnnnnnnnnnnnnnnnnnnnnnnnnnnnnnnnnnnnnnnnnnnnnnnnnnnnnnnnnnnnnnnnnnnnnnnnnnnnnnnnnnnnnnnnnnnnnnnnnnnnnnnnnnnnnnnnnnnnnnnnnnnnnnnnnnnnnnnnnnnnnnnnnnnnnnnnnnnnnnnnnnnnnnnnnnnnnnnnnnnnnnnnnnnnnnnnnnnnnnnnnnnnnnnnnnnnnnnnnnnnnnnnnnnnnnnnnnnnnnnnnnnnnnnnnnnnnnnnnnnnnnnnnnnnnnnnnnnnnnnnnnnnnnnnnnnnnnnnnnnnnnnnnnnnnnnnnnnnnnnnnnnnnnnnnnnnnnnnnnnnnnnnnnnnnnnnnnnnnnnnnnnnnnnnnnnnnnnnnnnnnnnnnnnnnnnnnnnnnnnnnnnnnnnnnnnnnnnnnnnnnnnnnnnnnnnnnnnnnnnnnnnnnnnnnnnnnnnnnnnnnnnnnnnnnnnnnnnnnnnnnnnnnnnnnnnnnnnnnnnnnnnnnnnnnnnnnnnnnnnnnnnnnnnnnnnnnnnnnnnnnnnnnnnnnnnnnnnnnnnnnnnnnnnnnnnnnnnnnnnnnnnnnnnnnnnnnnnnnnnnnnnnnnnnnnnnnnnnnnnnnnnnnnnnnnnnnnnnnnnnnnnnnnnnnnnnnnnnnnnnnnnnnnnnnnnnnnnnnnnnnnnnnnnnnnnnnnnnnnnnnnnnnnnnnnnnnnnnnnnnnnnnnnnnnnnnnnnnnnnnnnnnnnnnnnnnnnnnnnnnnnnnnnnnnnnnnnnnnnnnnnnnnnnnnnnnnnnnnnnnnnnnnnnnnnnnnnnnnnnnnnnnnnnnnnnnnnnnnnnnnnnnnnnnnnnnnnnnnnnnnnnnnnnnnnnnnnnnnnnnnnnnnnnnnnnnnnnnnnnnnnnnnnnnnnnnnnnnnnnnnnnnnnnnnnnnnnnnnnnnnnnnnnnnnnnnnnnnnnnnnnnnnnnnnnnnnnnnnnnnnnnnnnnnnnnnnnnnnnnnnnnnnnnnnnnnnnnnnnnnnnnnnnnnnnnnnnnnnnnnnnnnnnnnnnnnnnnnnnnnnnnnnnnnnnnnnnnnnnnnnnnnnnnnnnnnnnnnnnnnnnnnnnnnnnnnnnnnnnnnnnnnnnnnnnnnnnnnnnnnnnnnnnnnnnnnnnnnnnnnnnnnnnnnnnnnnnnnnnnnnnnnnnnnnnnnnnnnnnnnnnnnnnnnnnnnnnnnnnnnnnnnnnnnnnnnnnnnnnnnnnnnnnnnnnnnnnnnnnnnnnnnnnnnnnnnnnnnnnnnnnnnnnnnnnnnnnnnnnnnnnnnnnnnnnnnnnnnnnnnnnnnnnnnnnnnnnnnnnnnnnnnnnnnnnnnnnnnnnnnnnnnnnnnnnnnnnnnnnnnnnnnnnnnnnnnnnnnnnnnnnnnnnnnnnnnnnnnnnnnnnnnnnnnnnnnnnnnnnnnnnnnnnnnnnnnnnnnnnnnnnnnnnnnnnnnnnnnnnnnnnnnnnnnnnnnnnnnnnnnnnnnnnnnnnnnnnnnnnnnnnnnnnnnnnnnnnnnnnnnnnnnnnnnnnnnnnnnnnnnnnnnnnnnnnnnnnnnnnnnnnnnnnnnnnnnnnnnnnnnnnnnnnnnnnnnnnnnnnnnnnnnnnnnnnnnnnnnnnnnnnnnnnnnnnnnnnnnnnnnnnnnnnnnnnnnnnnnnnnnnnnnnnnnnnnnnnnnnnnnnnnnnnnnnnnnnnnnnnnnnnnnnnnnnnnnnnnnnnnnnnnnnnnnnnnnnnnnnnnnnnnnnnnnnnnnnnnnnnnnnnnnnnnnnnnnnnnnnnnnnnnnnnnnnnnnnnnnnnnnnnnnnnnnnnnnnnnnnnnnnnnnnnnnnnnnnnnnnnnnnnnnnnnnnnnnnnnnnnnnnnnnnnnnnnnnnnnnnnnnnnnnnnnnnnnnnnnnnnnnnnnnnnnnnnnnnnnnnnnnnnnnnnnnnnnnnnnnnnnnnnnnnnnnnnnnnnnnnnnnnnnnnnnnnnnnnnnnnnnnnnnnnnnnnnnnnnnnnnnnnnnnnnnnnnnnnnnnnnnnnnnnnnnnnnnnnnnnnnnnnnnnnnnnnnnnnnnnnnnnnnnnnnnnnnnnnnnnnnnnnnnnnnnnnnnnnnnnnnnnnnnnnnnnnnnnnnnnnnnnnnnnnnnnnnnnnnnnnnnnnnnnnnnnnnnnnnnnnnnnnnnnnnnnnnnnnnnnnnnnnnnnnnnnnnnnnnnnnnnnnnnnnnnnnnnnnnnnnnnnnnnnnnnnnnnnnnnnnnnnnnnnnnnnnnnnnnnnnnnnnnnnnnnnnnnnnnnnnnnnnnnnnnnnnnnnnnnnnnnnnnnnnnnnnnnnnnnnnnnnnnnnnnnnnnnnnnnnnnnnnnnnnnnnnnnnnnnnnnnnnnnnnnnnnnnnnnnnnnnnnnnnnnnnnnnnnnnnnnnnnnnnnnnnnnnnnnnnnnnnnnnnnnnnnnnnnnnnnnnnnnnnnnnnnnnnnnnnnnnnnnnnnnnnnnnnnnnnnnnnnnnnnnnnnnnnnnnnnnnnnnnnnnnnnnnnnnnnnnnnnnnnnnnnnnnnnnnnnnnnnnnnnnnnnnnnnnnnnnnnnnnnnnnnnnnnnnnnnnnnnnnnnnnnnnnnnnnnnnnnnnnnnnnnnnnnnnnnnnnnnnnnnnnnnnnnnnnnnnnnnnnnnnnnnnnnnnnnnnnnnnnnnnnnnnnnnnnnnnnnnnnnnnnnnnnnnnnnnnnnnnnnnnnnnnnnnnnnnnnnnnnnnnnnnnnnnnnnnnnnnnnnnnnnnnnnnnnnnnnnnnnnnnnnnnnnnnnnnnnnnnnnnnnnnnnnnnnnnnnnnnnnnnnnnnnnnnnnnnnnnnnnnnnnnnnnnnnnnnnnnnnnnnnnnnnnnnnnnnnnnnnnnnnnnnnnnnnnnnnnnnnnnnnnnnnnnnnnnnnnnnnnnnnnnnnnnnnnnnnnnnnnnnnnnnnnnnnnnnnnnnnnnnnnnnnnnnnnnnnnnnnnnnnnnnnnnnnnnnnnnnnnnnnnnnnnnnnnnnnnnnnnnnnnnnnnnnnnnnnnnnnnnnnnnnnnnnnnnnnnnnnnnnnnnnnnnnnnnnnnnnnnnnnnnnnnnnnnnnnnnnnnnnnnnnnnnnnnnnnnnnnnnnnnnnnnnnnnnnnnnnnnnnnnnnnnnnnnnnnnnnnnnnnnnnnnnnnnnnnnnnnnnnnnnnnnnnnnnnnnnnnnnnnnnnnnnnnnnnnnnnnnnnnnnnnnnnnnnnnnnnnnnnnnnnnnnnnnnnnnnnnnnnnnnnnnnnnnnnnnnnnnnnnnnnnnnnnnnnnnnnnnnnnnnnnnnnnnnnnnnnnnnnnnnnnnnnnnnnnnnnnnnnnnnnnnnnnnnnnnnnnnnnnnnnnnnnnnnnnnnnnnnnnnnnnnnnnnnnnnnnnnnnnnnnnnnnnnnnnnnnnnnnnnnnnnnnnnnnnnnnnnnnnnnnnnnnnnnnnnnnnnnnnnnnnnnnnnnnnnnnnnnnnnnnnnnnnnnnnnnnnnnnnnnnnnnnnnnnnnnnnnnnnnnnnnnnnnnnnnnnnnnnnnnnnnnnnnnnnnnnnnnnnnnnnnnnnnnnnnnnnnnnnnnnnnnnnnnnnnnnnnnnnnnnnnnnnnnnnnnnnnnnnnnnnnnnnnnnnnnnnnnnnnnnnnnnnnnnnnnnnnnnnnnnnnnnnnnnnnnnnnnnnnnnnnnnnnnnnnnnnnnnnnnnnnnnnnnnnnnnnnnnnnnnnnnnnnnnnnnnnnnnnnnnnnnnnnnnnnnnnnnnnnnnnnnnnnnnnnnnnnnnnnnnnnnnnnnnnnnnnnnnnnnnnnnnnnnnnnnnnnnnnnnnnnnnnnnnnnnnnnnnnnnnnnnnnnnnnnnnnnnnnnnnnnnnnnnnnnnnnnnnnnnnnnnnnnnnnnnnnnnnnnnnnnnnnnnnnnnnnnnnnnnnnnnnnnnnnnnnnnnnnnnnnnnnnnnnnnnnnnnnnnnnnnnnnnnnnnnnnnnnnnnnnnnnnnnnnnnnnnnnnnnnnnnnnnnnnnnnnnnnnnnnnnnnnnnnnnnnnnnnnnnnnnnnnnnnnnnnnnnnnnnnnnnnnnnnnnnnnnnnnnnnnnnnnnnnnnnnnnnnnnnnnnnnnnnnnnnnnnnnnnnnnnnnnnnnnnnnnnnnnnnnnnnnnnnnnnnnnnnnnnnnnnnnnnnnnnnnnnnnnnnnnnnnnnnnnnnnnnnnnnnnnnnnnnnnnnnnnnnnnnnnnnnnnnnnnnnnnnnnnnnnnnnnnnnnnnnnnnnnnnnnnnnnnnnnnnnnnnnnnnnnnnnnnnnnnnnnnnnnnnnnnnnnnnnnnnnnnnnnnnnnnnnnnnnnnnnnnnnnnnnnnnnnnnnnnnnnnnnnnnnnnnnnnnnnnnnnnnnnnnnnnnnnnnnnnnnnnnnnnnnnnnnnnnnnnnnnnnnnnnnnnnnnnnnnnnnnnnnnnnnnnnnnnnnnnnnnnnnnnnnnnnnnnnnnnnnnnnnnnnnnnnnnnnnnnnnnnnnnnnnnnnnnnnnnnnnnnnnnnnnnnnnnnnnnnnnnnnnnnnnnnnnnnnnnnnnnnnnnnnnnnnnnnnnnnnnnnnnnnnnnnnnnnnnnnnnnnnnnnnnnnnnnnnnnnnnnnnnnnnnnnnnnnnnnnnnnnnnnnnnnnnnnnnnnnnnnnnnnnnnnnnnnnnnnnnnnnnnnnnnnnnnnnnnnnnnnnnnnnnnnnnnnnnnnnnnnnnnnnnnnnnnnnnnnnnnnnnnnnnnnnnnnnnnnnnnnnnnnnnnnnnnnnnnnnnnnnnnnnnnnnnnnnnnnnnnnnnnnnnnnnnnnnnnnnnnnnnnnnnnnnnnnnnnnnnnnnnnnnnnnnnnnnnnnnnnnnnnnnnnnnnnnnnnnnnnnnnnnnnnnnnnnnnnnnnnnnnnnnnnnnnnnnnnnnnnnnnnnnnnnnnnnnnnnnnnnnnnnnnnnnnnnnnnnnnnnnnnnnnnnnnnnnnnnnnnnnnnnnnnnnnnnnnnnnnnnnnnnnnnnnnnnnnnnnnnnnnnnnnnnnnnnnnnnnnnnnnnnnnnnnnnnnnnnnnnnnnnnnnnnnnnnnnnnnnnnnnnnnnnnnnnnnnnnnnnnnnnnnnnnnnnnnnnnnnnnnnnnnnnnnnnnnnnnnnnnnnnnnnnnnnnnnnnnnnnnnnnnnnnnnnnnnnnnnnnnnnnnnnnnnnnnnnnnnnnnnnnnnnnnnnnnnnnnnnnnnnnnnnnnnnnnnnnnnnnnnnnnnnnnnnnnnnnnnnnnnnnnnnnnnnnnnnnnnnnnnnnnnnnnnnnnnnnnnnnnnnnnnnnnnnnnnnnnnnnnnnnnnnnnnnnnnnnnnnnnnnnnnnnnnnnnnnnnnnnnnnnnnnnnnnnnnnnnnnnnnnnnnnnnnnnnnnnnnnnnnnnnnnnnnnnnnnnnnnnnnnnnnnnnnnnnnnnnnnnnnnnnnnnnnnnnnnnnnnnnnnnnnnnnnnnnnnnnnnnnnnnnnnnnnnnnnnnnnnnnnnnnnnnnnnnnnnnnnnnnnnnnnnnnnnnnnnnnnnnnnnnnnnnnnnnnnnnnnnnnnnnnnnnnnnnnnnnnnnnnnnnnnnnnnnnnnnnnnnnnnnnnnnnnnnnnnnnnnnnnnnnnnnnnnnnnnnnnnnnnnnnnnnnnnnnnnnnnnnnnnnnnnnnnnnnnnnnnnnnnnnnnnnnnnnnnnnnnnnnnnnnnnnnnnnnnnnnnnnnnnnnnnnnnnnnnnnnnnnnnnnnnnnnnnnnnnnnnnnnnnnnnnnnnnnnnnnnnnnnnnnnnnnnnnnnnnnnnnnnnnnnnnnnnnnnnnnnnnnnnnnnnnnnnnnnnnnnnnnnnnnnnnnnnnnnnnnnnnnnnnnnnnnnnnnnnnnnnnnnnnnnnnnnnnnnnnnnnnnnnnnnnnnnnnnnnnnnnnnnnnnnnnnnnnnnnnnnnnnnnnnnnnnnnnnnnnnnnnnnnnnnnnnnnnnnnnnnnnnnnnnnnnnnnnnnnnnnnnnnnnnnnnnnnnnnnnnnnnnnnnnnnnnnnnnnnnnnnnnnnnnnnnnnnnnnnnnnnnnnnnnnnnnnnnnnnnnnnnnnnnnnnnnnnnnnnnnnnnnnnnnnnnnnnnnnnnnnnnnnnnnnnnnnnnnnnnnnnnnnnnnnnnnnnnnnnnnnnnnnnnnnnnnnnnnnnnnnnnnnnnnnnnnnnnnnnnnnnnnnnnnnnnnnnnnnnnnnnnnnnnnnnnnnnnnnnnnnnnnnnnnnnnnnnnnnnnnnnnnnnnnnnnnnnnnnnnnnnnnnnnnnnnnnnnnnnnnnnnnnnnnnnnnnnnnnnnnnnnnnnnnnnnnnnnnnnnnnnnnnnnnnnnnnnnnnnnnnnnnnnnnnnnnnnnnnnnnnnnnnnnnnnnnnnnnnnnnnnnnnnnnnnnnnnnnnnnnnnnnnnnnnnnnnnnnnnnnnnnnnnnnnnnnnnnnnnnnnnnnnnnnnnnnnnnnnnnnnnnnnnnnnnnnnnnnnnnnnnnnnnnnnnnnnnnnnnnnnnnnnnnnnnnnnnnnnnnnnnnnnnnnnnnnnnnnnnnnnnnnnnnnnnnnnnnnnnnnnnnnnnnnnnnnnnnnnnnnnnnnnnnnnnnnnnnnnnnnnnnnnnnnnnnnnnnnnnnnnnnnnnnnnnnnnnnnnnnnnnnnnnnnnnnnnnnnnnnnnnnnnnnnnnnnnnnnnnnnnnnnnnnnnnnnnnnnnnnnnnnnnnnnnnnnnnnnnnnnnnnnnnnnnnnnnnnnnnnnnnnnnnnnnnnnnnnnnnnnnnnnnnnnnnnnnnnnnnnnnnnnnnnnnnnnnnnnnnnnnnnnnnnnnnnnnnnnnnnnnnnnnnnnnnnnnnnnnnnnnnnnnnnnnnnnnnnnnnnnnnnnnnnnnnnnnnnnnnnnnnnnnnnnnnnnnnnnnnnnnnnnnnnnnnnnnnnnnnnnnnnnnnnnnnnnnnnnnnnnnnnnnnnnnnnnnnnnnnnnnnnnnnnnnnnnnnnnnnnnnnnnnnnnnnnnnnnnnnnnnnnnnnnnnnnnnnnnnnnnnnnnnnnnnnnnnnnnnnnnnnnnnnnnnnnnnnnnnnnnnnnnnnnnnnnnnnnnnnnnnnnnnnnnnnnnnnnnnnnnnnnnnnnnnnnnnnnnnnnnnnnnnnnnnnnnnnnnnnnnnnnnnnnnnnnnnnnnnnnnnnnnnnnnnnnnnnnnnnnnnnnnnnnnnnnnnnnnnnnnnnnnnnnnnnnnnnnnnnnnnnnnnnnnnnnnnnnnnnnnnnnnnnnnnnnnnnnnnnnnnnnnnnnnnnnnnnnnnnnnnnnnnnnnnnnnnnnnnnnnnnnnnnnnnnnnnnnnnnnnnnnnnnnnnnnnnnnnnnnnnnnnnnnnnnnnnnnnnnnnnnnnnnnnnnnnnnnnnnnnnnnnnnnnnnnnnnnnnnnnnnnnnnnnnnnnnnnnnnnnnnnnnnnnnnnnnnnnnnnnnnnnnnnnnnnnnnnnnnnnnnnnnnnnnnnnnnnnnnnnnnnnnnnnnnnnnnnnnnnnnnnnnnnnnnnnnnnnnnnnnnnnnnnnnnnnnnnnnnnnnnnnnnnnnnnnnnnnnnnnnnnnnnnnnnnnnnnnnnnnnnnnnnnnnnnnnnnnnnnnnnnnnnnnnnnnnnnnnnnnnnnnnnnnnnnnnnnnnnnnnnnnnnnnnnnnnnnnnnnnnnnnnnnnnnnnnnnnnnnnnnnnnnnnnnnnnnnnnnnnnnnnnnnnnnnnnnnnnnnnnnnnnnnnnnnnnnnnnnnnnnnnnnnnnnnnnnnnnnnnnnnnnnnnnnnnnnnnnnnnnnnnnnnnnnnnnnnnnnnnnnnnnnnnnnnnnnnnnnnnnnnnnnnnnnnnnnnnnnnnnnnnnnnnnnnnnnnnnnnnnnnnnnnnnnnnnnnnnnnnnnnnnnnnnnnnnnnnnnnnnnnnnnnnnnnnnnnnnnnnnnnnnnnnnnnnnnnnnnnnnnnnnnnnnnnnnnnnnnnnnnnnnnnnnnnnnnnnnnnnnnnnnnnnnnnnnnnnnnnnnnnnnnnnnnnnnnnnnnnnnnnnnnnnnnnnnnnnnnnnnnnnnnnnnnnnnnnnnnnnnnnnnnnnnnnnnnnnnnnnnnnnnnnnnnnnnnnnnnnnnnnnnnnnnnnnnnnnnnnnnnnnnnnnnnnnnnnnnnnnnnnnnnnnnnnnnnnnnnnnnnnnnnnnnnnnnnnnnnnnnnnnnnnnnnnnnnnnnnnnnnnnnnnnnnnnnnnnnnnnnnnnnnnnnnnnnnnnnnnnnnnnnnnnnnnnnnnnnnnnnnnnnnnnnnnnnnnnnnnnnnnnnnnnnnnnnnnnnnnnnnnnnnnnnnnnnnnnnnnnnnnnnnnnnnnnnnnnnnnnnnnnnnnnnnnnnnnnnnnnnnnnnnnnnnnnnnnnnnnnnnnnnnnnnnnnnnnnnnnnnnnnnnnnnnnnnnnnnnnnnnnnnnnnnnnnnnnnnnnnnnnnnnnnnnnnnnnnnnnnnnnnnnnnnnnnnnnnnnnnnnnnnnnnnnnnnnnnnnnnnnnnnnnnnnnnnnnnnnnnnnnnnnnnnnnnnnnnnnnnnnnnnnnnnnnnnnnnnnnnnnnnnnnnnnnnnnnnnnnnnnnnnnnnnnnnnnnnnnnnnnnnnnnnnnnnnnnnnnnnnnnnnnnnnnnnnnnnnnnnnnnnnnnnnnnnnnnnnnnnnnnnnnnnnnnnnnnnnnnnnnnnnnnnnnnnnnnnnnnnnnnnnnnnnnnnnnnnnnnnnnnnnnnnnnnnnnnnnnnnnnnnnnnnnnnnnnnnnnnnnnnnnnnnnnnnnnnnnnnnnnnnnnnnnnnnnnnnnnnnnnnnnnnnnnnnnnnnnnnnnnnnnnnnnnnnnnnnnnnnnnnnnnnnnnnnnnnnnnnnnnnnnnnnnnnnnnnnnnnnnnnnnnnnnnnnnnnnnnnnnnnnnnnnnnnnnnnnnnnnnnnnnnnnnnnnnnnnnnnnnnnnnnnnnnnnnnnnnnnnnnnnnnnnnnnnnnnnnnnnnnnnnnnnnnnnnnnnnnnnnnnnnnnnnnnnnnnnnnnnnnnnnnnnnnnnnnnnnnnnnnnnnnnnnnnnnnnnnnnnnnnnnnnnnnnnnnnnnnnnnnnnnnnnnnnnnnnnnnnnnnnnnnnnnnnnnnnnnnnnnnnnnnnnnnnnnnnnnnnnnnnnnnnnnnnnnnnnnnnnnnnnnnnnnnnnnnnnnnnnnnnnnnnnnnnnnnnnnnnnnnnnnnnnnnnnnnnnnnnnnnnnnnnnnnnnnnnnnnnnnnnnnnnnnnnnnnnnnnnnnnnnnnnnnnnnnnnnnnnnnnnnnnnnnnnnnnnnnnnnnnnnnnnnnnnnnnnnnnnnnnnnnnnnnnnnnnnnnnnnnnnnnnnnnnnnnnnnnnnnnnnnnnnnnnnnnnnnnnnnnnnnnnnnnnnnnnnnnnnnnnnnnnnnnnnnnnnnnnnnnnnnnnnnnnnnnnnnnnnnnnnnnnnnnnnnnnnnnnnnnnnnnnnnnnnnnnnnnnnnnnnnnnnnnnnnnnnnnnnnnnnnnnnnnnnnnnnnnnnnnnnnnnnnnnnnnnnnnnnnnnnnnnnnnnnnnnnnnnnnnnnnnnnnnnnnnnnnnnnnnnnnnnnnnnnnnnnnnnnnnnnnnnnnnnnnnnnnnnnnnnnnnnnnnnnnnnnnnnnnnnnnnnnnnnnnnnnnnnnnnnnnnnnnnnnnnnnnnnnnnnnnnnnnnnnnnnnnnnnnnnnnnnnnnnnnnnnnnnnnnnnnnnnnnnnnnnnnnnnnnnnnnnnnnnnnnnnnnnnnnnnnnnnnnnnnnnnnnnnnnnnnnnnnnnnnnnnnnnnnnnnnnnnnnnnnnnnnnnnnnnnnnnnnnnnnnnnnnnnnnnnnnnnnnnnnnnnnnnnnnnnnnnnnnnnnnnnnnnnnnnnnnnnnnnnnnnnnnnnnnnnnnnnnnnnnnnnnnnnnnnnnnnnnnnnnnnnnnnnnnnnnnnnnnnnnnnnnnnnnnnnnnnnnnnnnnnnnnnnnnnnnnnnnnnnnnnnnnnnnnnnnnnnnnnnnnnnnnnnnnnnnnnnnnnnnnnnnnnnnnnnnnnnnnnnnnnnnnnnnnnnnnnnnnnnnnnnnnnnnnnnnnnnnnnnnnnnnnnnnnnnnnnnnnnnnnnnnnnnnnnnnnnnnnnnnnnnnnnnnnnnnnnnnnnnnnnnnnnnnnnnnnnnnnnnnnnnnnnnnnnnnnnnnnnnnnnnnnnnnnnnnnnnnnnnnnnnnnnnnnnnnnnnnnnnnnnnnnnnnnnnnnnnnnnnnnnnnnnnnnnnnnnnnnnnnnnnnnnnnnnnnnnnnnnnnnnnnnnnnnnnnnnnnnnnnnnnnnnnnnnnnnnnnnnnnnnnnnnnnnnnnnnnnnnnnnnnnnnnnnnnnnnnnnnnnnnnnnnnnnnnnnnnnnnnnnnnnnnnnnnnnnnnnnnnnnnnnnnnnnnnnnnnnnnnnnnnnnnnnnnnnnnnnnnnnnnnnnnnnnnnnnnnnnnnnnnnnnnnnnnnnnnnnnnnnnnnnnnnnnnnnnnnnnnnnnnnnnnnnnnnnnnnnnnnnnnnnnnnnnnnnnnnnnnnnnnnnnnnnnnnnnnnnnnnnnnnnnnnnnnnnnnnnnnnnnnnnnnnnnnnnnnnnnnnnnnnnnnnnnnnnnnnnnnnnnnnnnnnnnnnnnnnnnnnnnnnnnnnnnnnnnnnnnnnnnnnnnnnnnnnnnnnnnnnnnnnnnnnnnnnnnnnnnnnnnnnnnnnnnnnnnnnnnnnnnnnnnnnnnnnnnnnnnnnnnnnnnnnnnnnnnnnnnnnnnnnnnnnnnnnnnnnnnnnnnnnnnnnnnnnnnnnnnnnnnnnnnnnnnnnnnnnnnnnnnnnnnnnnnnnnnnnnnnnnnnnnnnnnnnnnnnnnnnnnnnnnnnnnnnnnnnnnnnnnnnnnnnnnnnnnnnnnnnnnnnnnnnnnnnnnnnnnnnnnnnnnnnnnnnnnnnnnnnnnnnnnnnnnnnnnnnnnnnnnnnnnnnnnnnnnnnnnnnnnnnnnnnnnnnnnnnnnnnnnnnnnnnnnnnnnnnnnnnnnnnnnnnnnnnnnnnnnnnnnnnnnnnnnnnnnnnnnnnnnnnnnnnnnnnnnnnnnnnnnnnnnnnnnnnnnnnnnnnnnnnnnnnnnnnnnnnnnnnnnnnnnnnnnnnnnnnnnnnnnnnnnnnnnnnnnnnnnnnnnnnnnnnnnnnnnnnnnnnnnnnnnnnnnnnnnnnnnnnnnnnnnnnnnnnnnnnnnnnnnnnnnnnnnnnnnnnnnnnnnnnnnnnnnnnnnnnnnnnnnnnnnnnnnnnnnnnnnnnnnnnnnnnnnnnnnnnnnnnnnnnnnnnnnnnnnnnnnnnnnnnnnnnnnnnnnnnnnnnnnnnnnnnnnnnnnnnnnnnnnnnnnnnnnnnnnnnnnnnnnnnnnnnnnnnnnnnnnnnnnnnnnnnnnnnnnnnnnnnnnnnnnnnnnnnnnnnnnnnnnnnnnnnnnnnnnnnnnnnnnnnnnnnnnnnnnnnnnnnnnnnnnnnnnnnnnnnnnnnnnnnnnnnnnnnnnnnnnnnnnnnnnnnnnnnnnnnnnnnnnnnnnnnnnnnnnnnnnnnnnnnnnnnnnnnnnnnnnnnnnnnnnnnnnnnnnnnnnnnnnnnnnnnnnnnnnnnnnnnnnnnnnnnnnnnnnnnnnnnnnnnnnnnnnnnnnnnnnnnnnnnnnnnnnnnnnnnnnnnnnnnnnnnnnnnnnnnnnnnnnnnnnnnnnnnnnnnnnnnnnnnnnnnnnnnnnnnnnnnnnnnnnnnnnnnnnnnnnnnnnnnnnnnnnnnnnnnnnnnnnnnnnnnnnnnnnnnnnnnnnnnnnnnnnnnnnnnnnnnnnnnnnnnnnnnnnnnnnnnnnnnnnnnnnnnnnnnnnnnnnnnnnnnnnnnnnnnnnnnnnnnnnnnnnnnnnnnnnnnnnnnnnnnnnnnnnnnnnnnnnnnnnnnnnnnnnnnnnnnnnnnnnnnnnnnnnnnnnnnnnnnnnnnnnnnnnnnnnnnnnnnnnnnnnnnnnnnnnnnnnnnnnnnnnnnnnnnnnnnnnnnnnnnnnnnnnnnnnnnnnnnnnnnnnnnnnnnnnnnnnnnnnnnnnnnnnnnnnnnnnnnnnnnnnnnnnnnnnnnnnnnnnnnnnnnnnnnnnnnnnnnnnnnnnnnnnnnnnnnnnnnnnnnnnnnnnnnnnnnnnnnnnnnnnnnnnnnnnnnnnnnnnnnnnnnnnnnnnnnnnnnnnnnnnnnnnnnnnnnnnnnnnnnnnnnnnnnnnnnnnnnnnnnnnnnnnnnnnnnnnnnnnnnnnnnnnnnnnnnnnnnnnnnnnnnnnnnnnnnnnnnnnnnnnnnnnnnnnnnnnnnnnnnnnnnnnnnnnnnnnnnnnnnnnnnnnnnnnnnnnnnnnnnnnnnnnnnnnnnnnnnnnnnnnnnnnnnnnnnnnnnnnnnnnnnnnnnnnnnnnnnnnnnnnnnnnnnnnnnnnnnnnnnnnnnnnnnnnnnnnnnnnnnnnnnnnnnnnnnnnnnnnnnnnnnnnnnnnnnnnnnnnnnnnnnnnnnnnnnnnnnnnnnnnnnnnnnnnnnnnnnnnnnnnnnnnnnnnnnnnnnnnnnnnnnnnnnnnnnnnnnnnnnnnnnnnnnnnnnnnnnnnnnnnnnnnnnnnnnnnnnnnnnnnnnnnnnnnnnnnnnnnnnnnnnnnnnnnnnnnnnnnnnnnnnnnnnnnnnnnnnnnnnnnnnnnnnnnnnnnnnnnnnnnnnnnnnnnnnnnnnnnnnnnnnnnnnnnnnnnnnnnnnnnnnnnnnnnnnnnnnnnnnnnnnnnnnnnnnnnnnnnnnnnnnnnnnnnnnnnnnnnnnnnnnnnnnnnnnnnnnnnnnnnnnnnnnnnnnnnnnnnnnnnnnnnnnnnnnnnnnnnnnnnnnnnnnnnnnnnnnnnnnnnnnnnnnnnnnnnnnnnnnnnnnnnnnnnnnnnnnnnnnnnnnnnnnnnnnnnnnnnnnnnnnnnnnnnnnnnnnnnnnnnnnnnnnnnnnnnnnnnnnnnnnnnnnnnnnnnnnnnnnnnnnnnnnnnnnnnnnnnnnnnnnnnnnnnnnnnnnnnnnnnnnnnnnnnnnnnnnnnnnnnnnnnnnnnnnnnnnnnnnnnnnnnnnnnnnnnnnnnnnnnnnnnnnnnnnnnnnnnnnnnnnnnnnnnnnnnnnnnnnnnnnnnnnnnnnnnnnnnnnnnnnnnnnnnnnnnnnnnnnnnnnnnnnnnnnnnnnnnnnnnnnnnnnnnnnnnnnnnnnnnnnnnnnnnnnnnnnnnnnnnnnnnnnnnnnnnnnnnnnnnnnnnnnnnnnnnnnnnnnnnnnnnnnnnnnnnnnnnnnnnnnnnnnnnnnnnnnnnnnnnnnnnnnnnnnnnnnnnnnnnnnnnnnnnnnnnnnnnnnnnnnnnnnnnnnnnnnnnnnnnnnnnnnnnnnnnnnnnnnnnnnnnnnnnnnnnnnnnnnnnnnnnnnnnnnnnnnnnnnnnnnnnnnnnnnnnnnnnnnnnnnnnnnnnnnnnnnnnnnnnnnnnnnnnnnnnnnnnnnnnnnnnnnnnnnnnnnnnnnnnnnnnnnnnnnnnnnnnnnnnnnnnnnnnnnnnnnnnnnnnnnnnnnnnnnnnnnnnnnnnnnnnnnnnnnnnnnnnnnnnnnnnnnnnnnnnnnnnnnnnnnnnnnnnnnnnnnnnnnnnnnnnnnnnnnnnnnnnnnnnnnnnnnnnnnnnnnnnnnnnnnnnnnnnnnnnnnnnnnnnnnnnnnnnnnnnnnnnnnnnnnnnnnnnnnnnnnnnnnnnnnnnnnnnnnnnnnnnnnnnnnnnnnnnnnnnnnnnnnnnnnnnnnnnnnnnnnnnnnnnnnnnnnnnnnnnnnnnnnnnnnnnnnnnnnnnnnnnnnnnnnnnnnnnnnnnnnnnnnnnnnnnnnnnnnnnnnnnnnnnnnnnnnnnnnnnnnnnnnnnnnnnnnnnnnnnnnnnnnnnnnnnnnnnnnnnnnnnnnnnnnnnnnnnnnnnnnnnnnnnnnnnnnnnnnnnnnnnnnnnnnnnnnnnnnnnnnnnnnnnnnnnnnnnnnnnnnnnnnnnnnnnnnnnnnnnnnnnnnnnnnnnnnnnnnnnnnnnnnnnnnnnnnnnnnnnnnnnnnnnnnnnnnnnnnnnnnnnnnnnnnnnnnnnnnnnnnnnnnnnnnnnnnnnnnnnnnnnnnnnnnnnnnnnnnnnnnnnnnnnnnnnnnnnnnnnnnnnnnnnnnnnnnnnnnnnnnnnnnnnnnnnnnnnnnnnnnnnnnnnnnnnnnnnnnnnnnnnnnnnnnnnnnnnnnnnnnnnnnnnnnnnnnnnnnnnnnnnnnnnnnnnnnnnnnnnnnnnnnnnnnnnnnnnnnnnnnnnnnnnnnnnnnnnnnnnnnnnnnnnnnnnnnnnnnnnnnnnnnnnnnnnnnnnnnnnnnnnnnnnnnnnnnnnnnnnnnnnnnnnnnnnnnnnnnnnnnnnnnnnnnnnnnnnnnnnnnnnnnnnnnnnnnnnnnnnnnnnnnnnnnnnnnnnnnnnnnnnnnnnnnnnnnnnnnnnnnnnnnnnnnnnnnnnnnnnnnnnnnnnnnnnnnnnnnnnnnnnnnnnnnnnnnnnnnnnnnnnnnnnnnnnnnnnnnnnnnnnnnnnnnnnnnnnnnnnnnnnnnnnnnnnnnnnnnnnnnnnnnnnnnnnnnnnnnnnnnnnnnnnnnnnnnnnnnnnnnnnnnnnnnnnnnnnnnnnnnnnnnnnnnnnnnnnnnnnnnnnnnnnnnnnnnnnnnnnnnnnnnnnnnnnnnnnnnnnnnnnnnnnnnnnnnnnnnnnnnnnnnnnnnnnnnnnnnnnnnnnnnnnnnnnnnnnnnnnnnnnnnnnnnnnnnnnnnnnnnnnnnnnnnnnnnnnnnnnnnnnnnnnnnnnnnnnnnnnnnnnnnnnnnnnnnnnnnnnnnnnnnnnnnnnnnnnnnnnnnnnnnnnnnnnnnnnnnnnnnnnnnnnnnnnnnnnnnnnnnnnnnnnnnnnnnnnnnnnnnnnnnnnnnnnnnnnnnnnnnnnnnnnnnnnnnnnnnnnnnnnnnnnnnnnnnnnnnnnnnnnnnnnnnnnnnnnnnnnnnnnnnnnnnnnnnnnnnnnnnnnnnnnnnnnnnnnnnnnnnnnnnnnnnnnnnnnnnnnnnnnnnnnnnnnnnnnnnnnnnnnnnnnnnnnnnnnnnnnnnnnnnnnnnnnnnnnnnnnnnnnnnnnnnnnnnnnnnnnnnnnnnnnnnnnnnnnnnnnnnnnnnnnnnnnnnnnnnnnnnnnnnnnnnnnnnnnnnnnnnnnnnnnnnnnnnnnnnnnnnnnnnnnnnnnnnnnnnnnnnnnnnnnnnnnnnnnnnnnnnnnnnnnnnnnnnnnnnnnnnnnnnnnnnnnnnnnnnnnnnnnnnnnnnnnnnnnnnnnnnnnnnnnnnnnnnnnnnnnnnnnnnnnnnnnnnnnnnnnnnnnnnnnnnnnnnnnnnnnnnnnnnnnnnnnnnnnnnnnnnnnnnnnnnnnnnnnnnnnnnnnnnnnnnnnnnnnnnnnnnnnnnnnnnnnnnnnnnnnnnnnnnnnnnnnnnnnnnnnnnnnnnnnnnnnnnnnnnnnnnnnnnnnnnnnnnnnnnnnnnnnnnnnnnnnnnnnnnnnnnnnnnnnnnnnnnnnnnnnnnnnnnnnnnnnnnnnnnnnnnnnnnnnnnnnnnnnnnnnnnnnnnnnnnnnnnnnnnnnnnnnnnnnnnnnnnnnnnnnnnnnnnnnnnnnnnnnnnnnnnnnnnnnnnnnnnnnnnnnnnnnnnnnnnnnnnnnnnnnnnnnnnnnnnnnnnnnnnnnnnnnnnnnnnnnnnnnnnnnnnnnnnnnnnnnnnnnnnnnnnnnnnnnnnnnnnnnnnnnnnnnnnnnnnnnnnnnnnnnnnnnnnnnnnnnnnnnnnnnnnnnnnnnnnnnnnnnnnnnnnnnnnnnnnnnnnnnnnnnnnnnnnnnnnnnnnnnnnnnnnnnnnnnnnnnnnnnnnnnnnnnnnnnnnnnnnnnnnnnnnnnnnnnnnnnnnnnnnnnnnnnnnnnnnnnnnnnnnnnnnnnnnnnnnnnnnnnnnnnnnnnnnnnnnnnnnnnnnnnnnnnnnnnnnnnnnnnnnnnnnnnnnnnnnnnnnnnnnnnnnnnnnnnnnnnnnnnnnnnnnnnnnnnnnnnnnnnnnnnnnnnnnnnnnnnnnnnnnnnnnnnnnnnnnnnnnnnnnnnnnnnnnnnnnnnnnnnnnnnnnnnnnnnnnnnnnnnnnnnnnnnnnnnnnnnnnnnnnnnnnnnnnnnnnnnnnnnnnnnnnnnnnnnnnnnnnnnnnnnnnnnnnnnnnnnnnnnnnnnnnnnnnnnnnnnnnnnnnnnnnnnnnnnnnnnnnnnnnnnnnnnnnnnnnnnnnnnnnnnnnnnnnnnnnnnnnnnnnnnnnnnnnnnnnnnnnnnnnnnnnnnnnnnnnnnnnnnnnnnnnnnnnnnnnnnnnnnnnnnnnnnnnnnnnnnnnnnnnnnnnnnnnnnnnnnnnnnnnnnnnnnnnnnnnnnnnnnnnnnnnnnnnnnnnnnnnnnnnnnnnnnnnnnnnnnnnnnnnnnnnnnnnnnnnnnnnnnnnnnnnnnnnnnnnnnnnnnnnnnnnnnnnnnnnnnnnnnnnnnnnnnnnnnnnnnnnnnnnnnnnnnnnnnnnnnnnnnnnnnnnnnnnnnnnnnnnnnnnnnnnnnnnnnnnnnnnnnnnnnnnnnnnnnnnnnnnnnnnnnnnnnnnnnnnnnnnnnnnnnnnnnnnnnnnnnnnnnnnnnnnnnnnnnnnnnnnnnnnnnnnnnnnnnnnnnnnnnnnnnnnnnnnnnnnnnnnnnnnnnnnnnnnnnnnnnnnnnnnnnnnnnnnnnnnnnnnnnnnnnnnnnnnnnnnnnnnnnnnnnnnnnnnnnnnnnnnnnnnnnnnnnnnnnnnnnnnnnnnnnnnnnnnnnnnnnnnnnnnnnnnnnnnnnnnnnnnnnnnnnnnnnnnnnnnnnnnnnnnnnnnnnnnnnnnnnnnnnnnnnnnnnnnnnnnnnnnnnnnnnnnnnnnnnnnnnnnnnnnnnnnnnnnnnnnnnnnnnnnnnnnnnnnnnnnnnnnnnnnnnnnnnnnnnnnnnnnnnnnnnnnnnnnnnnnnnnnnnnnnnnnnnnnnnnnnnnnnnnnnnnnnnnnnnnnnnnnnnnnnnnnnnnnnnnnnnnnnnnnnnnnnnnnnnnnnnnnnnnnnnnnnnnnnnnnnnnnnnnnnnnnnnnnnnnnnnnnnnnnnnnnnnnnnnnnnnnnnnnnnnnnnnnnnnnnnnnnnnnnnnnnnnnnnnnnnnnnnnnnnnnnnnnnnnnnnnnnnnnnnnnnnnnnnnnnnnnnnnnnnnnnnnnnnnnnnnnnnnnnnnnnnnnnnnnnnnnnnnnnnnnnnnnnnnnnnnnnnnnnnnnnnnnnnnnnnnnnnnnnnnnnnnnnnnnnnnnnnnnnnnnnnnnnnnnnnnnnnnnnnnnnnnnnnnnnnnnnnnnnnnnnnnnnnnnnnnnnnnnnnnnnnnnnnnnnnnnnnnnnnnnnnnnnnnnnnnnnnnnnnnnnnnnnnnnnnnnnnnnnnnnnnnnnnnnnnnnnnnnnnnnnnnnnnnnnnnnnnnnnnnnnnnnnnnnnnnnnnnnnnnnnnnnnnnnnnnnnnnnnnnnnnnnnnnnnnnnnnnnnnnnnnnnnnnnnnnnnnnnnnnnnnnnnnnnnnnnnnnnnnnnnnnnnnnnnnnnnnnnnnnnnnnnnnnnnnnnnnnnnnnnnnnnnnnnnnnnnnnnnnnnnnnnnnnnnnnnnnnnnnnnnnnnnnnnnnnnnnnnnnnnnnnnnnnnnnnnnnnnnnnnnnnnnnnnnnnnnnnnnnnnnnnnnnnnnnnnnnnnnnnnnnnnnnnnnnnnnnnnnnnnnnnnnnnnnnnnnnnnnnnnnnnnnnnnnnnnnnnnnnnnnnnnnnnnnnnnnnnnnnnnnnnnnnnnnnnnnnnnnnnnnnnnnnnnnnnnnnnnnnnnnnnnnnnnnnnnnnnnnnnnnnnnnnnnnnnnnnnnnnnnnnnnnnnnnnnnnnnnnnnnnnnnnnnnnnnnnnnnnnnnnnnnnnnnnnnnnnnnnnnnnnnnnnnnnnnnnnnnnnnnnnnnnnnnnnnnnnnnnnnnnnnnnnnnnnnnnnnnnnnnnnnnnnnnnnnnnnnnnnnnnnnnnnnnnnnnnnnnnnnnnnnnnnnnnnnnnnnnnnnnnnnnnnnnnnnnnnnnnnnnnnnnnnnnnnnnnnnnnnnnnnnnnnnnnnnnnnnnnnnnnnnnnnnnnnnnnnnnnnnnnnnnnnnnnnnnnnnnnnnnnnnnnnnnnnnnnnnnnnnnnnnnnnnnnnnnnnnnnnnnnnnnnnnnnnnnnnnnnnnnnnnnnnnnnnnnnnnnnnnnnnnnnnnnnnnnnnnnnnnnnnnnnnnnnnnnnnnnnnnnnnnnnnnnnnnnnnnnnnnnnnnnnnnnnnnnnnnnnnnnnnnnnnnnnnnnnnnnnnnnnnnnnnnnnnnnnnnnnnnnnnnnnnnnnnnnnnnnnnnnnnnnnnnnnnnnnnnnnnnnnnnnnnnnnnnnnnnnnnnnnnnnnnnnnnnnnnnnnnnnnnnnnnnnnnnnnnnnnnnnnnnnnnnnnnnnnnnnnnnnnnnnnnnnnnnnnnnnnnnnnnnnnnnnnnnnnnnnnnnnnnnnnnnnnnnnnnnnnnnnnnnnnnnnnnnnnnnnnnnnnnnnnnnnnnnnnnnnnnnnnnnnnnnnnnnnnnnnnnnnnnnnnnnnnnnnnnnnnnnnnnnnnnnnnnnnnnnnnnnnnnnnnnnnnnnnnnnnnnnnnnnnnnnnnnnnnnnnnnnnnnnnnnnnnnnnnnnnnnnnnnnnnnnnnnnnnnnnnnnnnnnnnnnnnnnnnnnnnnnnnnnnnnnnnnnnnnnnnnnnnnnnnnnnnnnnnnnnnnnnnnnnnnnnnnnnnnnnnnnnnnnnnnnnnnnnnnnnnnnnnnnnnnnnnnnnnnnnnnnnnnnnnnnnnnnnnnnnnnnnnnnnnnnnnnnnnnnnnnnnnnnnnnnnnnnnnnnnnnnnnnnnnnnnnnnnnnnnnnnnnnnnnnnnnnnnnnnnnnnnnnnnnnnnnnnnnnnnnnnnnnnnnnnnnnnnnnnnnnnnnnnnnnnnnnnnnnnnnnnnnnnnnnnnnnnnnnnnnnnnnnnnnnnnnnnnnnnnnnnnnnnnnnnnnnnnnnnnnnnnnnnnnnnnnnnnnnnnnnnnnnnnnnnnnnnnnnnnnnnnnnnnnnnnnnnnnnnnnnnnnnnnnnnnnnnnnnnnnnnnnnnnnnnnnnnnnnnnnnnnnnnnnnnnnnnnnnnnnnnnnnnnnnnnnnnnnnnnnnnnnnnnnnnnnnnnnnnnnnnnnnnnnnnnnnnnnnnnnnnnnnnnnnnnnnnnnnnnnnnnnnnnnnnnnnnnnnnnnnnnnnnnnnnnnnnnnnnnnnnnnnnnnnnnnnnnnnnnnnnnnnnnnnnnnnnnnnnnnnnnnnnnnnnnnnnnnnnnnnnnnnnnnnnnnnnnnnnnnnnnnnnnnnnnnnnnnnnnnnnnnnnnnnnnnnnnnnnnnnnnnnnnnnnnnnnnnnnnnnnnnnnnnnnnnnnnnnnnnnnnnnnnnnnnnnnnnnnnnnnnnnnnnnnnnnnnnnnnnnnnnnnnnnnnnnnnnnnnnnnnnnnnnnnnnnnnnnnnnnnnnnnnnnnnnnnnnnnnnnnnnnnnnnnnnnnnnnnnnnnnnnnnnnnnnnnnnnnnnnnnnnnnnnnnnnnnnnnnnnnnnnnnnnnnnnnnnnnnnnnnnnnnnnnnnnnnnnnnnnnnnnnnnnnnnnnnnnnnnnnnnnnnnnnnnnnnnnnnnnnnnnnnnnnnnnnnnnnnnnnnnnnnnnnnnnnnnnnnnnnnnnnnnnnnnnnnnnnnnnnnnnnnnnnnnnnnnnnnnnnnnnnnnnnnnnnnnnnnnnnnnnnnnnnnnnnnnnnnnnnnnnnnnnnnnnnnnnnnnnnnnnnnnnnnnnnnnnnnnnnnnnnnnnnnnnnnnnnnnnnnnnnnnnnnnnnnnnnnnnnnnnnnnnnnnnnnnnnnnnnnnnnnnnnnnnnnnnnnnnnnnnnnnnnnnnnnnnnnnnnnnnnnnnnnnnnnnnnnnnnnnnnnnnnnnnnnnnnnnnnnnnnnnnnnnnnnnnnnnnnnnnnnnnnnnnnnnnnnnnnnnnnnnnnnnnnnnnnnnnnnnnnnnnnnnnnnnnnnnnnnnnnnnnnnnnnnnnnnnnnnnnnnnnnnnnnnnnnnnnnnnnnnnnnnnnnnnnnnnnnnnnnnnnnnnnnnnnnnnnnnnnnnnnnnnnnnnnnnnnnnnnnnnnnnnnnnnnnnnnnnnnnnnnnnnnnnnnnnnnnnnnnnnnnnnnnnnnnnnnnnnnnnnnnnnnnnnnnnnnnnnnnnnnnnnnnnnnnnnnnnnnnnnnnnnnnnnnnnnnnnnnnnnnnnnnnnnnnnnnnnnnnnnnnnnnnnnnnnnnnnnnnnnnnnnnnnnnnnnnnnnnnnnnnnnnnnnnnnnnnnnnnnnnnnnnnnnnnnnnnnnnnnnnnnnnnnnnnnnnnnnnnnnnnnnnnnnnnnnnnnnnnnnnnnnnnnnnnnnnnnnnnnnnnnnnnnnnnnnnnnnnnnnnnnnnnnnnnnnnnnnnnnnnnnnnnnnnnnnnnnnnnnnnnnnnnnnnnnnnnnnnnnnnnnnnnnnnnnnnnnnnnnnnnnnnnnnnnnnnnnnnnnnnnnnnnnnnnnnnnnnnnnnnnnnnnnnnnnnnnnnnnnnnnnnnnnnnnnnnnnnnnnnnnnnnnnnnnnnnnnnnnnnnnnnnnnnnnnnnnnnnnnnnnnnnnnnnnnnnnnnnnnnnnnnnnnnnnnnnnnnnnnnnnnnnnnnnnnnnnnnnnnnnnnnnnnnnnnnnnnnnnnnnnnnnnnnnnnnnnnnnnnnnnnnnnnnnnnnnnnnnnnnnnnnnnnnnnnnnnnnnnnnnnnnnnnnnnnnnnnnnnnnnnnnnnnnnnnnnnnnnnnnnnnnnnnnnnnnnnnnnnnnnnnnnnnnnnnnnnnnnnnnnnnnnnnnnnnnnnnnnnnnnnnnnnnnnnnnnnnnnnnnnnnnnnnnnnnnnnnnnnnnnnnnnnnnnnnnnnnnnnnnnnnnnnnnnnnnnnnnnnnnnnnnnnnnnnnnnnnnnnnnnnnnnnnnnnnnnnnnnnnnnnnnnnnnnnnnnnnnnnnnnnnnnnnnnnnnnnnnnnnnnnnnnnnnnnnnnnnnnnnnnnnnnnnnnnnnnnnnnnnnnnnnnnnnnnnnnnnnnnnnnnnnnnnnnnnnnnnnnnnnnnnnnnnnnnnnnnnnnnnnnnnnnnnnnnnnnnnnnnnnnnnnnnnnnnnnnnnnnnnnnnnnnnnnnnnnnnnnnnnnnnnnnnnnnnnnnnnnnnnnnnnnnnnnnnnnnnnnnnnnnnnnnnnnnnnnnnnnnnnnnnnnnnnnnnnnnnnnnnnnnnnnnnnnnnnnnnnnnnnnnnnnnnnnnnnnnnnnnnnnnnnnnnnnnnnnnnnnnnnnnnnnnnnnnnnnnnnnnnnnnnnnnnnnnnnnnnnnnnnnnnnnnnnnnnnnnnnnnnnnnnnnnnnnnnnnnnnnnnnnnnnnnnnnnnnnnnnnnnnnnnnnnnnnnnnnnnnnnnnnnnnnnnnnnnnnnnnnnnnnnnnnnnnnnnnnnnnnnnnnnnnnnnnnnnnnnnnnnnnnnnnnnnnnnnnnnnnnnnnnnnnnnnnnnnnnnnnnnnnnnnnnnnnnnnnnnnnnnnnnnnnnnnnnnnnnnnnnnnnnnnnnnnnnnnnnnnnnnnnnnnnnnnnnnnnnnnnnnnnnnnnnnnnnnnnnnnnnnnnnnnnnnnnnnnnnnnnnnnnnnnnnnnnnnnnnnnnnnnnnnnnnnnnnnnnnnnnnnnnnnnnnnnnnnnnnnnnnnnnnnnnnnnnnnnnnnnnnnnnnnnnnnnnnnnnnnnnnnnnnnnnnnnnnnnnnnnnnnnnnnnnnnnnnnnnnnnnnnnnnnnnnnnnnnnnnnnnnnnnnnnnnnnnnnnnnnnnnnnnnnnnnnnnnnnnnnnnnnnnnnnnnnnnnnnnnnnnnnnnnnnnnnnnnnnnnnnnnnnnnnnnnnnnnnnnnnnnnnnnnnnnnnnnnnnnnnnnnnnnnnnnnnnnnnnnnnnnnnnnnnnnnnnnnnnnnnnnnnnnnnnnnnnnnnnnnnnnnnnnnnnnnnnnnnnnnnnnnnnnnnnnnnnnnnnnnnnnnnnnnnnnnnnnnnnnnnnnnnnnnnnnnnnnnnnnnnnnnnnnnnnnnnnnnnnnnnnnnnnnnnnnnnnnnnnnnnnnnnnnnnnnnnnnnnnnnnnnnnnnnnnnnnnnnnnnnnnnnnnnnnnnnnnnnnnnnnnnnnnnnnnnnnnnnnnnnnnnnnnnnnnnnnnnnnnnnnnnnnnnnnnnnnnnnnnnnnnnnnnnnnnnnnnnnnnnnnnnnnnnnnnnnnnnnnnnnnnnnnnnnnnnnnnnnnnnnnnnnnnnnnnnnnnnnnnnnnnnnnnnnnnnnnnnnnnnnnnnnnnnnnnnnnnnnnnnnnnnnnnnnnnnnnnnnnnnnnnnnnnnnnnnnnnnnnnnnnnnnnnnnnnnnnnnnnnnnnnnnnnnnnnnnnnnnnnnnnnnnnnnnnnnnnnnnnnnnnnnnnnnnnnnnnnnnnnnnnnnnnnnnnnnnnnnnnnnnnnnnnnnnnnnnnnnnnnnnnnnnnnnnnnnnnnnnnnnnnnnnnnnnnnnnnnnnnnnnnnnnnnnnnnnnnnnnnnnnnnnnnnnnnnnnnnnnnnnnnnnnnnnnnnnnnnnnnnnnnnnnnnnnnnnnnnnnnnnnnnnnnnnnnnnnnnnnnnnnnnnnnnnnnnnnnnnnnnnnnnnnnnnnnnnnnnnnnnnnnnnnnnnnnnnnnnnnnnnnnnnnnnnnnnnnnnnnnnnnnnnnnnnnnnnnnnnnnnnnnnnnnnnnnnnnnnnnnnnnnnnnnnnnnnnnnnnnnnnnnnnnnnnnnnnnnnnnnnnnnnnnnnnnnnnnnnnnnnnnnnnnnnnnnnnnnnnnnnnnnnnnnnnnnnnnnnnnnnnnnnnnnnnnnnnnnnnnnnnnnnnnnnnnnnnnnnnnnnnnnnnnnnnnnnnnnnnnnnnnnnnnnnnnnnnnnnnnnnnnnnnnnnnnnnnnnnnnnnnnnnnnnnnnnnnnnnnnnnnnnnnnnnnnnnnnnnnnnnnnnnnnnnnnnnnnnnnnnnnnnnnnnnnnnnnnnnnnnnnnnnnnnnnnnnnnnnnnnnnnnnnnnnnnnnnnnnnnnnnnnnnnnnnnnnnnnnnnnnnnnnnnnnnnnnnnnnnnnnnnnnnnnnnnnnnnnnnnnnnnnnnnnnnnnnnnnnnnnnnnnnnnnnnnnnnnnnnnnnnnnnnnnnnnnnnnnnnnnnnnnnnnnnnnnnnnnnnnnnnnnnnnnnnnnnnnnnnnnnnnnnnnnnnnnnnnnnnnnnnnnnnnnnnnnnnnnnnnnnnnnnnnnnnnnnnnnnnnnnnnnnnnnnnnnnnnnnnnnnnnnnnnnnnnnnnnnnnnnnnnnnnnnnnnnnnnnnnnnnnnnnnnnnnnnnnnnnnnnnnnnnnnnnnnnnnnnnnnnnnnnnnnnnnnnnnnnnnnnnnnnnnnnnnnnnnnnnnnnnnnnnnnnnnnnnnnnnnnnnnnnnnnnnnnnnnnnnnnnnnnnnnnnnnnnnnnnnnnnnnnnnnnnnnnnnnnnnnnnnnnnnnnnnnnnnnnnnnnnnnnnnnnnnnnnnnnnnnnnnnnnnnnnnnnnnnnnnnnnnnnnnnnnnnnnnnnnnnnnnnnnnnnnnnnnnnnnnnnnnnnnnnnnnnnnnnnnnnnnnnnnnnnnnnnnnnnnnnnnnnnnnnnnnnnnnnnnnnnnnnnnnnnnnnnnnnnnnnnnnnnnnnnnnnnnnnnnnnnnnnnnnnnnnnnnnnnnnnnnnnnnnnnnnnnnnnnnnnnnnnnnnnnnnnnnnnnnnnnnnnnnnnnnnnnnnnnnnnnnnnnnnnnnnnnnnnnnnnnnnnnnnnnnnnnnnnnnnnnnnnnnnnnnnnnnnnnnnnnnnnnnnnnnnnnnnnnnnnnnnnnnnnnnnnnnnnnnnnnnnnnnnnnnnnnnnnnnnnnnnnnnnnnnnnnnnnnnnnnnnnnnnnnnnnnnnnnnnnnnnnnnnnnnnnnnnnnnnnnnnnnnnnnnnnnnnnnnnnnnnnnnnnnnnnnnnnnnnnnnnnnnnnnnnnnnnnnnnnnnnnnnnnnnnnnnnnnnnnnnnnnnnnnnnnnnnnnnnnnnnnnnnnnnnnnnnnnnnnnnnnnnnnnnnnnnnnnnnnnnnnnnnnnnnnnnnnnnnnnnnnnnnnnnnnnnnnnnnnnnnnnnnnnnnnnnnnnnnnnnnnnnnnnnnnnnnnnnnnnnnnnnnnnnnnnnnnnnnnnnnnnnnnnnnnnnnnnnnnnnnnnnnnnnnnnnnnnnnnnnnnnnnnnnnnnnnnnnnnnnnnnnnnnnnnnnnnnnnnnnnnnnnnnnnnnnnnnnnnnnnnnnnnnnnnnnnnnnnnnnnnnnnnnnnnnnnnnnnnnnnnnnnnnnnnnnnnnnnnnnnnnnnnnnnnnnnnnnnnnnnnnnnnnnnnnnnnnnnnnnnnnnnnnnnnnnnnnnnnnnnnnnnnnnnnnnnnnnnnnnnnnnnnnnnnnnnnnnnnnnnnnnnnnnnnnnnnnnnnnnnnnnnnnnnnnnnnnnnnnnnnnnnnnnnnnnnnnnnnnnnnnnnnnnnnnnnnnnnnnnnnnnnnnnnnnnnnnnnnnnnnnnnnnnnnnnnnnnnnnnnnnnnnnnnnnnnnnnnnnnnnnnnnnnnnnnnnnnnnnnnnnnnnnnnnnnnnnnnnnnnnnnnnnnnnnnnnnnnnnnnnnnnnnnnnnnnnnnnnnnnnnnnnnnnnnnnnnnnnnnnnnnnnnnnnnnnnnnnnnnnnnnnnnnnnnnnnnnnnnnnnnnnnnnnnnnnnnnnnnnnnnnnnnnnnnnnnnnnnnnnnnnnnnnnnnnnnnnnnnnnnnnnnnnnnnnnnnnnnnnnnnnnnnnnnnnnnnnnnnnnnnnnnnnnnnnnnnnnnnnnnnnnnnnnnnnnnnnnnnnnnnnnnnnnnnnnnnnnnnnnnnnnnnnnnnnnnnnnnnnnnnnnnnnnnnnnnnnnnnnnnnnnnnnnnnnnnnnnnnnnnnnnnnnnnnnnnnnnnnnnnnnnnnnnnnnnnnnnnnnnnnnnnnnnnnnnnnnnnnnnnnnnnnnnnnnnnnnnnnnnnnnnnnnnnnnnnnnnnnnnnnnnnnnnnnnnnnnnnnnnnnnnnnnnnnnnnnnnnnnnnnnnnnnnnnnnnnnnnnnnnnnnnnnnnnnnnnnnnnnnnnnnnnnnnnnnnnnnnnnnnnnnnnnnnnnnnnnnnnnnnnnnnnnnnnnnnnnnnnnnnnnnnnnnnnnnnnnnnnnnnnnnnnnnnnnnnnnnnnnnnnnnnnnnnnnnnnnnnnnnnnnnnnnnnnnnnnnnnnnnnnnnnnnnnnnnnnnnnnnnnnnnnnnnnnnnnnnnnnnnnnnnnnnnnnnnnnnnnnnnnnnnnnnnnnnnnnnnnnnnnnnnnnnnnnnnnnnnnnnnnnnnnnnnnnnnnnnnnnnnnnnnnnnnnnnnnnnnnnnnnnnnnnnnnnnnnnnnnnnnnnnnnnnnnnnnnnnnnnnnnnnnnnnnnnnnnnnnnnnnnnnnnnnnnnnnnnnnnnnnnnnnnnnnnnnnnnnnnnnnnnnnnnnnnnnnnnnnnnnnnnnnnnnnnnnnnnnnnnnnnnnnnnnnnnnnnnnnnnnnnnnnnnnnnnnnnnnnnnnnnnnnnnnnnnnnnnnnnnnnnnnnnnnnnnnnnnnnnnnnnnnnnnnnnnnnnnnnnnnnnnnnnnnnnnnnnnnnnnnnnnnnnnnnnnnnnnnnnnnnnnnnnnnnnnnnnnnnnnnnnnnnnnnnnnnnnnnnnnnnnnnnnnnnnnnnnnnnnnnnnnnnnnnnnnnnnnnnnnnnnnnnnnnnnnnnnnnnnnnnnnnnnnnnnnnnnnnnnnnnnnnnnnnnnnnnnnnnnnnnnnnnnnnnnnnnnnnnnnnnnnnnnnnnnnnnnnnnnnnnnnnnnnnnnnnnnnnnnnnnnnnnnnnnnnnnnnnnnnnnnnnnnnnnnnnnnnnnnnnnnnnnnnnnnnnnnnnnnnnnnnnnnnnnnnnnnnnnnnnnnnnnnnnnnnnnnnnnnnnnnnnnnnnnnnnnnnnnnnnnnnnnnnnnnnnnnnnnnnnnnnnnnnnnnnnnnnnnnnnnnnnnnnnnnnnnnnnnnnnnnnnnnnnnnnnnnnnnnnnnnnnnnnnnnnnnnnnnnnnnnnnnnnnnnnnnnnnnnnnnnnnnnnnnnnnnnnnnnnnnnnnnnnnnnnnnnnnnnnnnnnnnnnnnnnnnnnnnnnnnnnnnnnnnnnnnnnnnnnnnnnnnnnnnnnnnnnnnnnnnnnnnnnnnnnnnnnnnnnnnnnnnnnnnnnnnnnnnnnnnnnnnnnnnnnnnnnnnnnnnnnnnnnnnnnnnnnnnnnnnnnnnnnnnnnnnnnnnnnnnnnnnnnnnnnnnnnnnnnnnnnnnnnnnnnnnnnnnnnnnnnnnnnnnnnnnnnnnnnnnnnnnnnnnnnnnnnnnnnnnnnnnnnnnnnnnnnnnnnnnnnnnnnnnnnnnnnnnnnnnnnnnnnnnnnnnnnnnnnnnnnnnnnnnnnnnnnnnnnnnnnnnnnnnnnnnnnnnnnnnnnnnnnnnnnnnnnnnnnnnnnnnnnnnnnnnnnnnnnnnnnnnnnnnnnnnnnnnnnnnnnnnnnnnnnnnnnnnnnnnnnnnnnnnnnnnnnnnnnnnnnnnnnnnnnnnnnnnnnnnnnnnnnnnnnnnnnnnnnnnnnnnnnnnnnnnnnnnnnnnnnnnnnnnnnnnnnnnnnnnnnnnnnnnnnnnnnnnnnnnnnnnnnnnnnnnnnnnnnnnnnnnnnnnnnnnnnnnnnnnnnnnnnnnnnnnnnnnnnnnnnnnnnnnnnnnnnnnnnnnnnnnnnnnnnnnnnnnnnnnnnnnnnnnnnnnnnnnnnnnnnnnnnnnnnnnnnnnnnnnnnnnnnnnnnnnnnnnnnnnnnnnnnnnnnnnnnnnnnnnnnnnnnnnnnnnnnnnnnnnnnnnnnnnnnnnnnnnnnnnnnnnnnnnnnnnnnnnnnnnnnnnnnnnnnnnnnnnnnnnnnnnnnnnnnnnnnnnnnnnnnnnnnnnnnnnnnnnnnnnnnnnnnnnnnnnnnnnnnnnnnnnnnnnnnnnnnnnnnnnnnnnnnnnnnnnnnnnnnnnnnnnnnnnnnnnnnnnnnnnnnnnnnnnnnnnnnnnnnnnnnnnnnnnnnnnnnnnnnnnnnnnnnnnnnnnnnnnnnnnnnnnnnnnnnnnnnnnnnnnnnnnnnnnnnnnnnnnnnnnnnnnnnnnnnnnnnnnnnnnnnnnnnnnnnnnnnnnnnnnnnnnnnnnnnnnnnnnnnnnnnnnnnnnnnnnnnnnnnnnnnnnnnnnnnnnnnnnnnnnnnnnnnnnnnnnnnnnnnnnnnnnnnnnnnnnnnnnnnnnnnnnnnnnnnnnnnnnnnnnnnnnnnnnnnnnnnnnnnnnnnnnnnnnnnnnnnnnnnnnnnnnnnnnnnnnnnnnnnnnnnnnnnnnnnnnnnnnnnnnnnnnnnnnnnnnnnnnnnnnnnnnnnnnnnnnnnnnnnnnnnnnnnnnnnnnnnnnnnnnnnnnnnnnnnnnnnnnnnnnnnnnnnnnnnnnnnnnnnnnnnnnnnnnnnnnnnnnnnnnnnnnnnnnnnnnnnnnnnnnnnnnnnnnnnnnnnnnnnnnnnnnnnnnnnnnnnnnnnnnnnnnnnnnnnnnnnnnnnnnnnnnnnnnnnnnnnnnnnnnnnnnnnnnnnnnnnnnnnnnnnnnnnnnnnnnnnnnnnnnnnnnnnnnnnnnnnnnnnnnnnnnnnnnnnnnnnnnnnnnnnnnnnnnnnnnnnnnnnnnnnnnnnnnnnnnnnnnnnnnnnnnnnnnnnnnnnnnnnnnnnnnnnnnnnnnnnnnnnnnnnnnnnnnnnnnnnnnnnnnnnnnnnnnnnnnnnnnnnnnnnnnnnnnnnnnnnnnnnnnnnnnnnnnnnnnnnnnnnnnnnnnnnnnnnnnnnnnnnnnnnnnnnnnnnnnnnnnnnnnnnnnnnnnnnnnnnnnnnnnnnnnnnnnnnnnnnnnnnnnnnnnnnnnnnnnnnnnnnnnnnnnnnnnnnnnnnnnnnnnnnnnnnnnnnnnnnnnnnnnnnnnnnnnnnnnnnnnnnnnnnnnnnnnnnnnnnnnnnnnnnnnnnnnnnnnnnnnnnnnnnnnnnnnnnnnnnnnnnnnnnnnnnnnnnnnnnnnnnnnnnnnnnnnnnnnnnnnnnnnnnnnnnnnnnnnnnnnnnnnnnnnnnnnnnnnnnnnnnnnnnnnnnnnnnnnnnnnnnnnnnnnnnnnnnnnnnnnnnnnnnnnnnnnnnnnnnnnnnnnnnnnnnnnnnnnnnnnnnnnnnnnnnnnnnnnnnnnnnnnnnnnnnnnnnnnnnnnnnnnnnnnnnnnnnnnnnnnnnnnnnnnnnnnnnnnnnnnnnnnnnnnnnnnnnnnnnnnnnnnnnnnnnnnnnnnnnnnnnnnnnnnnnnnnnnnnnnnnnnnnnnnnnnnnnnnnnnnnnnnnnnnnnnnnnnnnnnnnnnnnnnnnnnnnnnnnnnnnnnnnnnnnnnnnnnnnnnnnnnnnnnnnnnnnnnnnnnnnnnnnnnnnnnnnnnnnnnnnnnnnnnnnnnnnnnnnnnnnnnnnnnnnnnnnnnnnnnnnnnnnnnnnnnnnnnnnnnnnnnnnnnnnnnnnnnnnnnnnnnnnnnnnnnnnnnnnnnnnnnnnnnnnnnnnnnnnnnnnnnnnnnnnnnnnnnnnnnnnnnnnnnnnnnnnnnnnnnnnnnnnnnnnnnnnnnnnnnnnnnnnnnnnnnnnnnnnnnnnnnnnnnnnnnnnnnnnnnnnnnnnnnnnnnnnnnnnnnnnnnnnnnnnnnnnnnnnnnnnnnnnnnnnnnnnnnnnnnnnnnnnnnnnnnnnnnnnnnnnnnnnnnnnnnnnnnnnnnnnnnnnnnnnnnnnnnnnnnnnnnnnnnnnnnnnnnnnnnnnnnnnnnnnnnnnnnnnnnnnnnnnnnnnnnnnnnnnnnnnnnnnnnnnnnnnnnnnnnnnnnnnnnnnnnnnnnnnnnnnnnnnnnnnnnnnnnnnnnnnnnnnnnnnnnnnnnnnnnnnnnnnnnnnnnnnnnnnnnnnnnnnnnnnnnnnnnnnnnnnnnnnnnnnnnnnnnnnnnnnnnnnnnnnnnnnnnnnnnnnnnnnnnnnnnnnnnnnnnnnnnnnnnnnnnnnnnnnnnnnnnnnnnnnnnnnnnnnnnnnnnnnnnnnnnnnnnnnnnnnnnnnnnnnnnnnnnnnnnnnnnnnnnnnnnnnnnnnnnnnnnnnnnnnnnnnnnnnnnnnnnnnnnnnnnnnnnnnnnnnnnnnnnnnnnnnnnnnnnnnnnnnnnnnnnnnnnnnnnnnnnnnnnnnnnnnnnnnnnnnnnnnnnnnnnnnnnnnnnnnnnnnnnnnnnnnnnnnnnnnnnnnnnnnnnnnnnnnnnnnnnnnnnnnnnnnnnnnnnnnnnnnnnnnnnnnnnnnnnnnnnnnnnnnnnnnnnnnnnnnnnnnnnnnnnnnnnnnnnnnnnnnnnnnnnnnnnnnnnnnnnnnnnnnnnnnnnnnnnnnnnnnnnnnnnnnnnnnnnnnnnnnnnnnnnnnnnnnnnnnnnnnnnnnnnnnnnnnnnnnnnnnnnnnnnnnnnnnnnnnnnnnnnnnnnnnnnnnnnnnnnnnnnnnnnnnnnnnnnnnnnnnnnnnnnnnnnnnnnnnnnnnnnnnnnnnnnnnnnnnnnnnnnnnnnnnnnnnnnnnnnnnnnnnnnnnnnnnnnnnnnnnnnnnnnnnnnnnnnnnnnnnnnnnnnnnnnnnnnnnnnnnnnnnnnnnnnnnnnnnnnnnnnnnnnnnnnnnnnnnnnnnnnnnnnnnnnnnnnnnnnnnnnnnnnnnnnnnnnnnnnnnnnnnnnnnnnnnnnnnnnnnnnnnnnnnnnnnnnnnnnnnnnnnnnnnnnnnnnnnnnnnnnnnnnnnnnnnnnnnnnnnnnnnnnnnnnnnnnnnnnnnnnnnnnnnnnnnnnnnnnnnnnnnnnnnnnnnnnnnnnnnnnnnnnnnnnnnnnnnnnnnnnnnnnnnnnnnnnnnnnnnnnnnnnnnnnnnnnnnnnnnnnnnnnnnnnnnnnnnnnnnnnnnnnnnnnnnnnnnnnnnnnnnnnnnnnnnnnnnnnnnnnnnnnnnnnnnnnnnnnnnnnnnnnnnnnnnnnnnnnnnnnnnnnnnnnnnnnnnnnnnnnnnnnnnnnnnnnnnnnnnnnnnnnnnnnnnnnnnnnnnnnnnnnnnnnnnnnnnnnnnnnnnnnnnnnnnnnnnnnnnnnnnnnnnnnnnnnnnnnnnnnnnnnnnnnnnnnnnnnnnnnnnnnnnnnnnnnnnnnnnnnnnnnnnnnnnnnnnnnnnnnnnnnnnnnnnnnnnnnnnnnnnnnnnnnnnnnnnnnnnnnnnnnnnnnnnnnnnnnnnnnnnnnnnnnnnnnnnnnnnnnnnnnnnnnnnnnnnnnnnnnnnnnnnnnnnnnnnnnnnnnnnnnnnnnnnnnnnnnnnnnnnnnnnnnnnnnnnnnnnnnnnnnnnnnnnnnnnnnnnnnnnnnnnnnnnnnnnnnnnnnnnnnnnnnnnnnnnnnnnnnnnnnnnnnnnnnnnnnnnnnnnnnnnnnnnnnnnnnnnnnnnnnnnnnnnnnnnnnnnnnnnnnnnnnnnnnnnnnnnnnnnnnnnnnnnnnnnnnnnnnnnnnnnnnnnnnnnnnnnnnnnnnnnnnnnnnnnnnnnnnnnnnnnnnnnnnnnnnnnnnnnnnnnnnnnnnnnnnnnnnnnnnnnnnnnnnnnnnnnnnnnnnnnnnnnnnnnnnnnnnnnnnnnnnnnnnnnnnnnnnnnnnnnnnnnnnnnnnnnnnnnnnnnnnnnnnnnnnnnnnnnnnnnnnnnnnnnnnnnnnnnnnnnnnnnnnnnnnnnnnnnnnnnnnnnnnnnnnnnnnnnnnnnnnnnnnnnnnnnnnnnnnnnnnnnnnnnnnnnnnnnnnnnnnnnnnnnnnnnnnnnnnnnnnnnnnnnnnnnnnnnnnnnnnnnnnnnnnnnnnnnnnnnnnnnnnnnnnnnnnnnnnnnnnnnnnnnnnnnnnnnnnnnnnnnnnnnnnnnnnnnnnnnnnnnnnnnnnnnnnnnnnnnnnnnnnnnnnnnnnnnnnnnnnnnnnnnnnnnnnnnnnnnnnnnnnnnnnnnnnnnnnnnnnnnnnnnnnnnnnnnnnnnnnnnnnnnnnnnnnnnnnnnnnnnnnnnnnnnnnnnnnnnnnnnnnnnnnnnnnnnnnnnnnnnnnnnnnnnnnnnnnnnnnnnnnnnnnnnnnnnnnnnnnnnnnnnnnnnnnnnnnnnnnnnnnnnnnnnnnnnnnnnnnnnnnnnnnnnnnnnnnnnnnnnnnnnnnnnnnnnnnnnnnnnnnnnnnnnnnnnnnnnnnnnnnnnnnnnnnnnnnnnnnnnnnnnnnnnnnnnnnnnnnnnnnnnnnnnnnnnnnnnnnnnnnnnnnnnnnnnnnnnnnnnnnnnnnnnnnnnnnnnnnnnnnnnnnnnnnnnnnnnnnnnnnnnnnnnnnnnnnnnnnnnnnnnnnnnnnnnnnnnnnnnnnnnnnnnnnnnnnnnnnnnnnnnnnnnnnnnnnnnnnnnnnnnnnnnnnnnnnnnnnnnnnnnnnnnnnnnnnnnnnnnnnnnnnnnnnnnnnnnnnnnnnnnnnnnnnnnnnnnnnnnnnnnnnnnnnnnnnnnnnnnnnnnnnnnnnnnnnnnnnnnnnnnnnnnnnnnnnnnnnnnnnnnnnnnnnnnnnnnnnnnnnnnnnnnnnnnnnnnnnnnnnnnnnnnnnnnnnnnnnnnnnnnnnnnnnnnnnnnnnnnnnnnnnnnnnnnnnnnnnnnnnnnnnnnnnnnnnnnnnnnnnnnnnnnnnnnnnnnnnnnnnnnnnnnnnnnnnnnnnnnnnnnnnnnnnnnnnnnnnnnnnnnnnnnnnnnnnnnnnnnnnnnnnnnnnnnnnnnnnnnnnnnnnnnnnnnnnnnnnnnnnnnnnnnnnnnnnnnnnnnnnnnnnnnnnnnnnnnnnnnnnnnnnnnnnnnnnnnnnnnnnnnnnnnnnnnnnnnnnnnnnnnnnnnnnnnnnnnnnnnnnnnnnnnnnnnnnnnnnnnnnnnnnnnnnnnnnnnnnnnnnnnnnnnnnnnnnnnnnnnnnnnnnnnnnnnnnnnnnnnnnnnnnnnnnnnnnnnnnnnnnnnnnnnnnnnnnnnnnnnnnnnnnnnnnnnnnnnnnnnnnnnnnnnnnnnnnnnnnnnnnnnnnnnnnnnnnnnnnnnnnnnnnnnnnnnnnnnnnnnnnnnnnnnnnnnnnnnnnnnnnnnnnnnnnnnnnnnnnnnnnnnnnnnnnnnnnnnnnnnnnnnnnnnnnnnnnnnnnnnnnnnnnnnnnnnnnnnnnnnnnnnnnnnnnnnnnnnnnnnnnnnnnnnnnnnnnnnnnnnnnnnnnnnnnnnnnnnnnnnnnnnnnnnnnnnnnnnnnnnnnnnnnnnnnnnnnnnnnnnnnnnnnnnnnnnnnnnnnnnnnnnnnnnnnnnnnnnnnnnnnnnnnnnnnnnnnnnnnnnnnnnnnnnnnnnnnnnnnnnnnnnnnnnnnnnnnnnnnnnnnnnnnnnnnnnnnnnnnnnnnnnnnnnnnnnnnnnnnnnnnnnnnnnnnnnnnnnnnnnnnnnnnnnnnnnnnnnnnnnnnnnnnnnnnnnnnnnnnnnnnnnnnnnnnnnnnnnnnnnnnnnnnnnnnnnnnnnnnnnnnnnnnnnnnnnnnnnnnnnnnnnnnnnnnnnnnnnnnnnnnnnnnnnnnnnnnnnnnnnnnnnnnnnnnnnnnnnnnnnnnnnnnnnnnnnnnnnnnnnnnnnnnnnnnnnnnnnnnnnnnnnnnnnnnnnnnnnnnnnnnnnnnnnnnnnnnnnnnnnnnnnnnnnnnnnnnnnnnnnnnnnnnnnnnnnnnnnnnnnnnnnnnnnnnnnnnnnnnnnnnnnnnnnnnnnnnnnnnnnnnnnnnnnnnnnnnnnnnnnnnnnnnnnnnnnnnnnnnnnnnnnnnnnnnnnnnnnnnnnnnnnnnnnnnnnnnnnnnnnnnnnnnnnnnnnnnnnnnnnnnnnnnnnnnnnnnnnnnnnnnnnnnnnnnnnnnnnnnnnnnnnnnnnnnnnnnnnnnnnnnnnnnnnnnnnnnnnnnnnnnnnnnnnnnnnnnnnnnnnnnnnnnnnnnnnnnnnnnnnnnnnnnnnnnnnnnnnnnnnnnnnnnnnnnnnnnnnnnnnnnnnnnnnnnnnnnnnnnnnnnnnnnnnnnnnnnnnnnnnnnnnnnnnnnnnnnnnnnnnnnnnnnnnnnnnnnnnnnnnnnnnnnnnnnnnnnnnnnnnnnnnnnnnnnnnnnnnnnnnnnnnnnnnnnnnnnnnnnnnnnnnnnnnnnnnnnnnnnnnnnnnnnnnnnnnnnnnnnnnnnnnnnnnnnnnnnnnnnnnnnnnnnnnnnnnnnnnnnnnnnnnnnnnnnnnnnnnnnnnnnnnnnnnnnnnnnnnnnnnnnnnnnnnnnnnnnnnnnnnnnnnnnnnnnnnnnnnnnnnnnnnnnnnnnnnnnnnnnnnnnnnnnnnnnnnnnnnnnnnnnnnnnnnnnnnnnnnnnnnnnnnnnnnnnnnnnnnnnnnnnnnnnnnnnnnnnnnnnnnnnnnnnnnnnnnnnnnnnnnnnnnnnnnnnnnnnnnnnnnnnnnnnnnnnnnnnnnnnnnnnnnnnnnnnnnnnnnnnnnnnnnnnnnnnnnnnnnnnnnnnnnnnnnnnnnnnnnnnnnnnnnnnnnnnnnnnnnnnnnnnnnnnnnnnnnnnnnnnnnnnnnnnnnnnnnnnnnnnnnnnnnnnnnnnnnnnnnnnnnnnnnnnnnnnnnnnnnnnnnnnnnnnnnnnnnnnnnnnnnnnnnnnnnnnnnnnnnnnnnnnnnnnnnnnnnnnnnnnnnnnnnnnnnnnnnnnnnnnnnnnnnnnnnnnnnnnnnnnnnnnnnnnnnnnnnnnnnnnnnnnnnnnnnnnnnnnnnnnnnnnnnnnnnnnnnnnnnnnnnnnnnnnnnnnnnnnnnnnnnnnnnnnnnnnnnnnnnnnnnnnnnnnnnnnnnnnnnnnnnnnnnnnnnnnnnnnnnnnnnnnnnnnnnnnnnnnnnnnnnnnnnnnnnnnnnnnnnnnnnnnnnnnnnnnnnnnnnnnnnnnnnnnnnnnnnnnnnnnnnnnnnnnnnnnnnnnnnnnnnnnnnnnnnnnnnnnnnnnnnnnnnnnnnnnnnnnnnnnnnnnnnnnnnnnnnnnnnnnnnnnnnnnnnnnnnnnnnnnnnnnnnnnnnnnnnnnnnnnnnnnnnnnnnnnnnnnnnnnnnnnnnnnnnnnnnnnnnnnnnnnnnnnnnnnnnnnnnnnnnnnnnnnnnnnnnnnnnnnnnnnnnnnnnnnnnnnnnnnnnnnnnnnnnnnnnnnnnnnnnnnnnnnnnnnnnnnnnnnnnnnnnnnnnnnnnnnnnnnnnnnnnnnnnnnnnnnnnnnnnnnnnnnnnnnnnnnnnnnnnnnnnnnnnnnnnnnnnnnnnnnnnnnnnnnnnnnnnnnnnnnnnnnnnnnnnnnnnnnnnnnnnnnnnnnnnnnnnnnnnnnnnnnnnnnnnnnnnnnnnnnnnnnnnnnnnnnnnnnnnnnnnnnnnnnnnnnnnnnnnnnnnnnnnnnnnnnnnnnnnnnnnnnnnnnnnnnnnnnnnnnnnnnnnnnnnnnnnnnnnnnnnnnnnnnnnnnnnnnnnnnnnnnnnnnnnnnnnnnnnnnnnnnnnnnnnnnnnnnnnnnnnnnnnnnnnnnnnnnnnnnnnnnnnnnnnnnnnnnnnnnnnnnnnnnnnnnnnnnnnnnnnnnnnnnnnnnnnnnnnnnnnnnnnnnnnnnnnnnnnnnnnnnnnnnnnnnnnnnnnnnnnnnnnnnnnnnnnnnnnnnnnnnnnnnnnnnnnnnnnnnnnnnnnnnnnnnnnnnnnnnnnnnnnnnnnnnnnnnnnnnnnnnnnnnnnnnnnnnnnnnnnnnnnnnnnnnnnnnnnnnnnnnnnnnnnnnnnnnnnnnnnnnnnnnnnnnnnnnnnnnnnnnnnnnnnnnnnnnnnnnnnnnnnnnnnnnnnnnnnnnnnnnnnnnnnnnnnnnnnnnnnnnnnnnnnnnnnnnnnnnnnnnnnnnnnnnnnnnnnnnnnnnnnnnnnnnnnnnnnnnnnnnnnnnnnnnnnnnnnnnnnnnnnnnnnnnnnnnnnnnnnnnnnnnnnnnnnnnnnnnnnnnnnnnnnnnnnnnnnnnnnnnnnnnnnnnnnnnnnnnnnnnnnnnnnnnnnnnnnnnnnnnnnnnnnnnnnnnnnnnnnnnnnnnnnnnnnnnnnnnnnnnnnnnnnnnnnnnnnnnnnnnnnnnnnnnnnnnnnnnnnnnnnnnnnnnnnnnnnnnnnnnnnnnnnnnnnnnnnnnnnnnnnnnnnnnnnnnnnnnnnnnnnnnnnnnnnnnnnnnnnnnnnnnnnnnnnnnnnnnnnnnnnnnnnnnnnnnnnnnnnnnnnnnnnnnnnnnnnnnnnnnnnnnnnnnnnnnnnnnnnnnnnnnnnnnnnnnnnnnnnnnnnnnnnnnnnnnnnnnnnnnnnnnnnnnnnnnnnnnnnnnnnnnnnnnnnnnnnnnnnnnnnnnnnnnnnnnnnnnnnnnnnnnnnnnnnnnnnnnnnnnnnnnnnnnnnnnnnnnnnnnnnnnnnnnnnnnnnnnnnnnnnnnnnnnnnnnnnnnnnnnnnnnnnnnnnnnnnnnnnnnnnnnnnnnnnnnnnnnnnnnnnnnnnnnnnnnnnnnnnnnnnnnnnnnnnnnnnnnnnnnnnnnnnnnnnnnnnnnnnnnnnnnnnnnnnnnnnnnnnnnnnnnnnnnnnnnnnnnnnnnnnnnnnnnnnnnnnnnnnnnnnnnnnnnnnnnnnnnnnnnnnnnnnnnnnnnnnnnnnnnnnnnnnnnnnnnnnnnnnnnnnnnnnnnnnnnnnnnnnnnnnnnnnnnnnnnnnnnnnnnnnnnnnnnnnnnnnnnnnnnnnnnnnnnnnnnnnnnnnnnnnnnnnnnnnnnnnnnnnnnnnnnnnnnnnnnnnnnnnnnnnnnnnnnnnnnnnnnnnnnnnnnnnnnnnnnnnnnnnnnnnnnnnnnnnnnnnnnnnnnnnnnnnnnnnnnnnnnnnnnnnnnnnnnnnnnnnnnnnnnnnnnnnnnnnnnnnnnnnnnnnnnnnnnnnnnnnnnnnnnnnnnnnnnnnnnnnnnnnnnnnnnnnnnnnnnnnnnnnnnnnnnnnnnnnnnnnnnnnnnnnnnnnnnnnnnnnnnnnnnnnnnnnnnnnnnnnnnnnnnnnnnnnnnnnnnnnnnnnnnnnnnnnnnnnnnnnnnnnnnnnnnnnnnnnnnnnnnnnnnnnnnnnnnnnnnnnnnnnnnnnnnnnnnnnnnnnnnnnnnnnnnnnnnnnnnnnnnnnnnnnnnnnnnnnnnnnnnnnnnnnnnnnnnnnnnnnnnnnnnnnnnnnnnnnnnnnnnnnnnnnnnnnnnnnnnnnnnnnnnnnnnnnnnnnnnnnnnnnnnnnnnnnnnnnnnnnnnnnnnnnnnnnnnnnnnnnnnnnnnnnnnnnnnnnnnnnnnnnnnnnnnnnnnnnnnnnnnnnnnnnnnnnnnnnnnnnnnnnnnnnnnnnnnnnnnnnnnnnnnnnnnnnnnnnnnnnnnnnnnnnnnnnnnnnnnnnnnnnnnnnnnnnnnnnnnnnnnnnnnnnnnnnnnnnnnnnnnnnnnnnnnnnnnnnnnnnnnnnnnnnnnnnnnnnnnnnnnnnnnnnnnnnnnnnnnnnnnnnnnnnnnnnnnnnnnnnnnnnnnnnnnnnnnnnnnnnnnnnnnnnnnnnnnnnnnnnnnnnnnnnnnnnnnnnnnnnnnnnnnnnnnnnnnnnnnnnnnnnnnnnnnnnnnnnnnnnnnnnnnnnnnnnnnnnnnnnnnnnnnnnnnnnnnnnnnnnnnnnnnnnnnnnnnnnnnnnnnnnnnnnnnnnnnnnnnnnnnnnnnnnnnnnnnnnnnnnnnnnnnnnnnnnnnnnnnnnnnnnnnnnnnnnnnnnnnnnnnnnnnnnnnnnnnnnnnnnnnnnnnnnnnnnnnnnnnnnnnnnnnnnnnnnnnnnnnnnnnnnnnnnnnnnnnnnnnnnnnnnnnnnnnnnnnnnnnnnnnnnnnnnnnnnnnnnnnnnnnnnnnnnnnnnnnnnnnnnnnnnnnnnnnnnnnnnnnnnnnnnnnnnnnnnnnnnnnnnnnnnnnnnnnnnnnnnnnnnnnnnnnnnnnnnnnnnnnnnnnnnnnnnnnnnnnnnnnnnnnnnnnnnnnnnnnnnnnnnnnnnnnnnnnnnnnnnnnnnnnnnnnnnnnnnnnnnnnnnnnnnnnnnnnnnnnnnnnnnnnnnnnnnnnnnnnnnnnnnnnnnnnnnnnnnnnnnnnnnnnnnnnnnnnnnnnnnnnnnnnnnnnnnnnnnnnnnnnnnnnnnnnnnnnnnnnnnnnnnnnnnnnnnnnnnnnnnnnnnnnnnnnnnnnnnnnnnnnnnnnnnnnnnnnnnnnnnnnnnnnnnnnnnnnnnnnnnnnnnnnnnnnnnnnnnnnnnnnnnnnnnnnnnnnnnnnnnnnnnnnnnnnnnnnnnnnnnnnnnnnnnnnnnnnnnnnnnnnnnnnnnnnnnnnnnnnnnnnnnnnnnnnnnnnnnnnnnnnnnnnnnnnnnnnnnnnnnnnnnnnnnnnnnnnnnnnnnnnnnnnnnnnnnnnnnnnnnnnnnnnnnnnnnnnnnnnnnnnnnnnnnnnnnnnnnnnnnnnnnnnnnnnnnnnnnnnnnnnnnnnnnnnnnnnnnnnnnnnnnnnnnnnnnnnnnnnnnnnnnnnnnnnnnnnnnnnnnnnnnnnnnnnnnnnnnnnnnnnnnnnnnnnnnnnnnnnnnnnnnnnnnnnnnnnnnnnnnnnnnnnnnnnnnnnnnnnnnnnnnnnnnnnnnnnnnnnnnnnnnnnnnnnnnnnnnnnnnnnnnnnnnnnnnnnnnnnnnnnnnnnnnnnnnnnnnnnnnnnnnnnnnnnnnnnnnnnnnnnnnnnnnnnnnnnnnnnnnnnnnnnnnnnnnnnnnnnnnnnnnnnnnnnnnnnnnnnnnnnnnnnnnnnnnnnnnnnnnnnnnnnnnnnnnnnnnnnnnnnnnnnnnnnnnnnnnnnnnnnnnnnnnnnnnnnnnnnnnnnnnnnnnnnnnnnnnnnnnnnnnnnnnnnnnnnnnnnnnnnnnnnnnnnnnnnnnnnnnnnnnnnnnnnnnnnnnnnnnnnnnnnnnnnnnnnnnnnnnnnnnnnnnnnnnnnnnnnnnnnnnnnnnnnnnnnnnnnnnnnnnnnnnnnnnnnnnnnnnnnnnnnnnnnnnnnnnnnnnnnnnnnnnnnnnnnnnnnnnnnnnnnnnnnnnnnnnnnnnnnnnnnnnnnnnnnnnnnnnnnnnnnnnnnnnnnnnnnnnnnnnnnnnnnnnnnnnnnnnnnnnnnnnnnnnnnnnnnnnnnnnnnnnnnnnnnnnnnnnnnnnnnnnnnnnnnnnnnnnnnnnnnnnnnnnnnnnnnnnnnnnnnnnnnnnnnnnnnnnnnnnnnnnnnnnnnnnnnnnnnnnnnnnnnnnnnnnnnnnnnnnnnnnnnnnnnnnnnnnnnnnnnnnnnnnnnnnnnnnnnnnnnnnnnnnnnnnnnnnnnnnnnnnnnnnnnnnnnnnnnnnnnnnnnnnnnnnnnnnnnnnnnnnnnnnnnnnnnnnnnnnnnnnnnnnnnnnnnnnnnnnnnnnnnnnnnnnnnnnnnnnnnnnnnnnnnnnnnnnnnnnnnnnnnnnnnnnnnnnnnnnnnnnnnnnnnnnnnnnnnnnnnnnnnnnnnnnnnnnnnnnnnnnnnnnnnnnnnnnnnnnnnnnnnnnnnnnnnnnnnnnnnnnnnnnnnnnnnnnnnnnnnnnnnnnnnnnnnnnnnnnnnnnnnnnnnnnnnnnnnnnnnnnnnnnnnnnnnnnnnnnnnnnnnnnnnnnnnnnnnnnnnnnnnnnnnnnnnnnnnnnnnnnnnnnnnnnnnnnnnnnnnnnnnnnnnnnnnnnnnnnnnnnnnnnnnnnnnnnnnnnnnnnnnnnnnnnnnnnnnnnnnnnnnnnnnnnnnnnnnnnnnnnnnnnnnnnnnnnnnnnnnnnnnnnnnnnnnnnnnnnnnnnnnnnnnnnnnnnnnnnnnnnnnnnnnnnnnnnnnnnnnnnnnnnnnnnnnnnnnnnnnnnnnnnnnnnnnnnnnnnnnnnnnnnnnnnnnnnnnnnnnnnnnnnnnnnnnnnnnnnnnnnnnnnnnnnnnnnnnnnnnnnnnnnnnnnnnnnnnnnnnnnnnnnnnnnnnnnnnnnnnnnnnnnnnnnnnnnnnnnnnnnnnnnnnnnnnnnnnnnnnnnnnnnnnnnnnnnnnnnnnnnnnnnnnnnnnnnnnnnnnnnnnnnnnnnnnnnnnnnnnnnnnnnnnnnnnnnnnnnnnnnnnnnnnnnnnnnnnnnnnnnnnnnnnnnnnnnnnnnnnnnnnnnnnnnnnnnnnnnnnnnnnnnnnnnnnnnnnnnnnnnnnnnnnnnnnnnnnnnnnnnnnnnnnnnnnnnnnnnnnnnnnnnnnnnnnnnnnnnnnnnnnnnnnnnnnnnnnnnnnnnnnnnnnnnnnnnnnnnnnnnnnnnnnnnnnnnnnnnnnnnnnnnnnnnnnnnnnnnnnnnnnnnnnnnnnnnnnnnnnnnnnnnnnnnnnnnnnnnnnnnnnnnnnnnnnnnnnnnnnnnnnnnnnnnnnnnnnnnnnnnnnnnnnnnnnnnnnnnnnnnnnnnnnnnnnnnnnnnnnnnnnnnnnnnnnnnnnnnnnnnnnnnnnnnnnnnnnnnnnnnnnnnnnnnnnnnnnnnnnnnnnnnnnnnnnnnnnnnnnnnnnnnnnnnnnnnnnnnnnnnnnnnnnnnnnnnnnnnnnnnnnnnnnnnnnnnnnnnnnnnnnnnnnnnnnnnnnnnnnnnnnnnnnnnnnnnnnnnnnnnnnnnnnnnnnnnnnnnnnnnnnnnnnnnnnnnnnnnnnnnnnnnnnnnnnnnnnnnnnnnnnnnnnnnnnnnnnnnnnnnnnnnnnnnnnnnnnnnnnnnnnnnnnnnnnnnnnnnnnnnnnnnnnnnnnnnnnnnnnnnnnnnnnnnnnnnnnnnnnnnnnnnnnnnnnnnnnnnnnnnnnnnnnnnnnnnnnnnnnnnnnnnnnnnnnnnnnnnnnnnnnnnnnnnnnnnnnnnnnnnnnnnnnnnnnnnnnnnnnnnnnnnnnnnnnnnnnnnnnnnnnnnnnnnnnnnnnnnnnnnnnnnnnnnnnnnnnnnnnnnnnnnnnnnnnnnnnnnnnnnnnnnnnnnnnnnnnnnnnnnnnnnnnnnnnnnnnnnnnnnnnnnnnnnnnnnnnnnnnnnnnnnnnnnnnnnnnnnnnnnnnnnnnnnnnnnnnnnnnnnnnnnnnnnnnnnnnnnnnnnnnnnnnnnnnnnnnnnnnnnnnnnnnnnnnnnnnnnnnnnnnnnnnnnnnnnnnnnnnnnnnnnnnnnnnnnnnnnnnnnnnnnnnnnnnnnnnnnnnnnnnnnnnnnnnnnnnnnnnnnnnnnnnnnnnnnnnnnnnnnnnnnnnnnnnnnnnnnnnnnnnnnnnnnnnnnnnnnnnnnnnnnnnnnnnnnnnnnnnnnnnnnnnnnnnnnnnnnnnnnnnnnnnnnnnnnnnnnnnnnnnnnnnnnnnnnnnnnnnnnnnnnnnnnnnnnnnnnnnnnnnnnnnnnnnnnnnnnnnnnnnnnnnnnnnnnnnnnnnnnnnnnnnnnnnnnnnnnnnnnnnnnnnnnnnnnnnnnnnnnnnnnnnnnnnnnnnnnnnnnnnnnnnnnnnnnnnnnnnnnnnnnnnnnnnnnnnnnnnnnnnnnnnnnnnnnnnnnnnnnnnnnnnnnnnnnnnnnnnnnnnnnnnnnnnnnnnnnnnnnnnnnnnnnnnnnnnnnnnnnnnnnnnnnnnnnnnnnnnnnnnnnnnnnnnnnnnnnnnnnnnnnnnnnnnnnnnnnnnnnnnnnnnnnnnnnnnnnnnnnnnnnnnnnnnnnnnnnnnnnnnnnnnnnnnnnnnnnnnnnnnnnnnnnnnnnnnnnnnnnnnnnnnnnnnnnnnnnnnnnnnnnnnnnnnnnnnnnnnnnnnnnnnnnnnnnnnnnnnnnnnnnnnnnnnnnnnnnnnnnnnnnnnnnnnnnnnnnnnnnnnnnnnnnnnnnnnnnnnnnnnnnnnnnnnnnnnnnnnnnnnnnnnnnnnnnnnnnnnnnnnnnnnnnnnnnnnnnnnnnnnnnnnnnnnnnnnnnnnnnnnnnnnnnnnnnnnnnnnnnnnnnnnnnnnnnnnnnnnnnnnnnnnnnnnnnnnnnnnnnnnnnnnnnnnnnnnnnnnnnnnnnnnnnnnnnnnnnnnnnnnnnnnnnnnnnnnnnnnnnnnnnnnnnnnnnnnnnnnnnnnnnnnnnnnnnnnnnnnnnnnnnnnnnnnnnnnnnnnnnnnnnnnnnnnnnnnnnnnnnnnnnnnnnnnnnnnnnnnnnnnnnnnnnnnnnnnnnnnnnnnnnnnnnnnnnnnnnnnnnnnnnnnnnnnnnnnnnnnnnnnnnnnnnnnnnnnnnnnnnnnnnnnnnnnnnnnnnnnnnnnnnnnnnnnnnnnnnnnnnnnnnnnnnnnnnnnnnnnnnnnnnnnnnnnnnnnnnnnnnnnnnnnnnnnnnnnnnnnnnnnnnnnnnnnnnnnnnnnnnnnnnnnnnnnnnnnnnnnnnnnnnnnnnnnnnnnnnnnnnnnnnnnnnnnnnnnnnnnnnnnnnnnnnnnnnnnnnnnnnnnnnnnnnnnnnnnnnnnnnnnnnnnnnnnnnnnnnnnnnnnnnnnnnnnnnnnnnnnnnnnnnnnnnnnnnnnnnnnnnnnnnnnnnnnnnnnnnnnnnnnnnnnnnnnnnnnnnnnnnnnnnnnnnnnnnnnnnnnnnnnnnnnnnnnnnnnnnnnnnnnnnnnnnnnnnnnnnnnnnnnnnnnnnnnnnnnnnnnnnnnnnnnnnnnnnnnnnnnnnnnnnnnnnnnnnnnnnnnnnnnnnnnnnnnnnnnnnnnnnnnnnnnnnnnnnnnnnnnnnnnnnnnnnnnnnnnnnnnnnnnnnnnnnnnnnnnnnnnnnnnnnnnnnnnnnnnnnnnnnnnnnnnnnnnnnnnnnnnnnnnnnnnnnnnnnnnnnnnnnnnnnnnnnnnnnnnnnnnnnnnnnnnnnnnnnnnnnnnnnnnnnnnnnnnnnnnnnnnnnnnnnnnnnnnnnnnnnnnnnnnnnnnnnnnnnnnnnnnnnnnnnnnnnnnnnnnnnnnnnnnnnnnnnnnnnnnnnnnnnnnnnnnnnnnnnnnnnnnnnnnnnnnnnnnnnnnnnnnnnnnnnnnnnnnnnnnnnnnnnnnnnnnnnnnnnnnnnnnnnnnnnnnnnnnnnnnnnnnnnnnnnnnnnnnnnnnnnnnnnnnnnnnnnnnnnnnnnnnnnnnnnnnnnnnnnnnnnnnnnnnnnnnnnnnnnnnnnnnnnnnnnnnnnnnnnnnnnnnnnnnnnnnnnnnnnnnnnnnnnnnnnnnnnnnnnnnnnnnnnnnnnnnnnnnnnnnnnnnnnnnnnnnnnnnnnnnnnnnnnnnnnnnnnnnnnnnnnnnnnnnnnnnnnnnnnnnnnnnnnnnnnnnnnnnnnnnnnnnnnnnnnnnnnnnnnnnnnnnnnnnnnnnnnnnnnnnnnnnnnnnnnnnnnnnnnnnnnnnnnnnnnnnnnnnnnnnnnnnnnnnnnnnnnnnnnnnnnnnnnnnnnnnnnnnnnnnnnnnnnnnnnnnnnnnnnnnnnnnnnnnnnnnnnnnnnnnnnnnnnnnnnnnnnnnnnnnnnnnnnnnnnnnnnnnnnnnnnnnnnnnnnnnnnnnnnnnnnnnnnnnnnnnnnnnnnnnnnnnnnnnnnnnnnnnnnnnnnnnnnnnnnnnnnnnnnnnnnnnnnnnnnnnnnnnnnnnnnnnnnnnnnnnnnnnnnnnnnnnnnnnnnnnnnnnnnnnnnnnnnnnnnnnnnnnnnnnnnnnnnnnnnnnnnnnnnnnnnnnnnnnnnnnnnnnnnnnnnnnnnnnnnnnnnnnnnnnnnnnnnnnnnnnnnnnnnnnnnnnnnnnnnnnnnnnnnnnnnnnnnnnnnnnnnnnnnnnnnnnnnnnnnnnnnnnnnnnnnnnnnnnnnnnnnnnnnnnnnnnnnnnnnnnnnnnnnnnnnnnnnnnnnnnnnnnnnnnnnnnnnnnnnnnnnnnnnnnnnnnnnnnnnnnnnnnnnnnnnnnnnnnnnnnnnnnnnnnnnnnnnnnnnnnnnnnnnnnnnnnnnnnnnnnnnnnnnnnnnnnnnnnnnnnnnnnnnnnnnnnnnnnnnnnnnnnnnnnnnnnnnnnnnnnnnnnnnnnnnnnnnnnnnnnnnnnnnnnnnnnnnnnnnnnnnnnnnnnnnnnnnnnnnnnnnnnnnnnnnnnnnnnnnnnnnnnnnnnnnnnnnnnnnnnnnnnnnnnnnnnnnnnnnnnnnnnnnnnnnnnnnnnnnnnnnnnnnnnnnnnnnnnnnnnnnnnnnnnnnnnnnnnnnnnnnnnnnnnnnnnnnnnnnnnnnnnnnnnnnnnnnnnnnnnnnnnnnnnnnnnnnnnnnnnnnnnnnnnnnnnnnnnnnnnnnnnnnnnnnnnnnnnnnnnnnnnnnnnnnnnnnnnnnnnnnnnnnnnnnnnnnnnnnnnnnnnnnnnnnnnnnnnnnnnnnnnnnnnnnnnnnnnnnnnnnnnnnnnnnnnnnnnnnnnnnnnnnnnnnnnnnnnnnnnnnnnnnnnnnnnnnnnnnnnnnnnnnnnnnnnnnnnnnnnnnnnnnnnnnnnnnnnnnnnnnnnnnnnnnnnnnnnnnnnnnnnnnnnnnnnnnnnnnnnnnnnnnnnnnnnnnnnnnnnnnnnnnnnnnnnnnnnnnnnnnnnnnnnnnnnnnnnnnnnnnnnnnnnnnnnnnnnnnnnnnnnnnnnnnnnnnnnnnnnnnnnnnnnnnnnnnnnnnnnnnnnnnnnnnnnnnnnnnnnnnnnnnnnnnnnnnnnnnnnnnnnnnnnnnnnnnnnnnnnnnnnnnnnnnnnnnnnnnnnnnnnnnnnnnnnnnnnnnnnnnnnnnnnnnnnnnnnnnnnnnnnnnnnnnnnnnnnnnnnnnnnnnnnnnnnnnnnnnnnnnnnnnnnnnnnnnnnnnnnnnnnnnnnnnnnnnnnnnnnnnnnnnnnnnnnnnnnnnnnnnnnnnnnnnnnnnnnnnnnnnnnnnnnnnnnnnnnnnnnnnnnnnnnnnnnnnnnnnnnnnnnnnnnnnnnnnnnnnnnnnnnnnnnnnnnnnnnnnnnnnnnnnnnnnnnnnnnnnnnnnnnnnnnnnnnnnnnnnnnnnnnnnnnnnnnnnnnnnnnnnnnnnnnnnnnnnnnnnnnnnnnnnnnnnnnnnnnnnnnnnnnnnnnnnnnnnnnnnnnnnnnnnnnnnnnnnnnnnnnnnnnnnnnnnnnnnnnnnnnnnnnnnnnnnnnnnnnnnnnnnnnnnnnnnnnnnnnnnnnnnnnnnnnnnnnnnnnnnnnnnnnnnnnnnnnnnnnnnnnnnnnnnnnnnnnnnnnnnnnnnnnnnnnnnnnnnnnnnnnnnnnnnnnnnnnnnnnnnnnnnnnnnnnnnnnnnnnnnnnnnnnnnnnnnnnnnnnnnnnnnnnnnnnnnnnnnnnnnnnnnnnnnnnnnnnnnnnnnnnnnnnnnnnnnnnnnnnnnnnnnnnnnnnnnnnnnnnnnnnnnnnnnnnnnnnnnnnnnnnnnnnnnnnnnnnnnnnnnnnnnnnnnnnnnnnnnnnnnnnnnnnnnnnnnnnnnnnnnnnnnnnnnnnnnnnnnnnnnnnnnnnnnnnnnnnnnnnnnnnnnnnnnnnnnnnnnnnnnnnnnnnnnnnnnnnnnnnnnnnnnnnnnnnnnnnnnnnnnnnnnnnnnnnnnnnnnnnnnnnnnnnnnnnnnnnnnnnnnnnnnnnnnnnnnnnnnnnnnnnnnnnnnnnnnnnnnnnnnnnnnnnnnnnnnnnnnnnnnnnnnnnnnnnnnnnnnnnnnnnnnnnnnnnnnnnnnnnnnnnnnnnnnnnnnnnnnnnnnnnnnnnnnnnnnnnnnnnnnnnnnnnnnnnnnnnnnnnnnnnnnnnnnnnnnnnnnnnnnnnnnnnnnnnnnnnnnnnnnnnnnnnnnnnnnnnnnnnnnnnnnnnnnnnnnnnnnnnnnnatatatcttatcctattaaggtaaaaaaaataagtcctacttagttaaataatatagttataataatattaaagtaatttaggaactatagtctataatcgaggatactaaggcccttaataactataaggctaagttaactatagtagtaaagatactaaaaaagaataggactaagaatatatatctaaaatataagaagctttaattatagattaaaaattagtactatattccctatattaatagaatttatatataggtataggtaaagttattatatctaactaaacttaaatactaatagaatagtattaaaaatataatagagtagtaaaataaactctatacttagggtatcttaggaaataggggctaagtttatagggataaataaagtattactaagtatacctatattaagaactatactttcctctataatattaatagaagtattaaagaactccttaactttagagatttcccttatattttctataatccctaaggctctaagaactttagtaattactataatctctatagcttctataatagtagtagcctttttagccttattagctatataggttaagtacttaatattctacttaataatatatacttaaggtatataagtatatataggtaatatattaagagtaatataggtagtagactaaatcttagaaggaagctatactattattaataataaattccttcctataataatatagttaaaacttataaggatataactatactttataaaagagtagtaaatatatttaatataacctataagggtcttatacttatagtctaggtagctttataactagaaaaagtattactaataaggtaatagccctttaataggcttaggggtttctaaatatgatactattaaaatagaagtatattctatagaagttagaaatactaagtacacttattactagctataaaaagctaagtaagtactatatataaataattagttataaaggaaacctctttactattaggataatactagcccttaatagttaacttcaattcttctaattagatagctactaggagcctaaatagtataataaatattagaaatccttcttagatatattagtatcttattaagaataccttactttagactaggggttagctaatatattaactataatattagctagctttaggctatataggctactaaagagtaggtagaagtctataagactagctattaataaggtaacctaataccttaatagtagtatactatatcttagtcttccctactattttactatactatactaaccactctctacctttagaccttattaatactaagcctttatagttctagtaggagaataaaacttattttcctataattatataacttacctacgatatcctcttaatactaataactagggctagtattaagtaactctttaatactatataggatatttactattattaccgcggttacctaaagtctaagataattaaggagcttatactatactactatataactaagtttagtattaaggatactaagataaaggaattatagtagttacttagtctaatagaggctaaggttaagaataaggagagtactaactttctagaggatagtaagtataatctaattaataataataaggaggagaagggaggggaaggtaatagggtataggaggtatctccttcctccttagctagtagggataggggtagtaatagtgatagtaagatagagggggtttagctagatttactagagcctattactctattttatatatcttagaggaagtataagagtagggttaataataattatatatattattagaatatattaatagtactatcttcttaatttttactcctttctttaaattttcctagtattctagctataactaggatatataataatataggttagaaatatattagttatatatctatacgctagaggcctatttatattatataaggcctatataggcccctattataggctataggcctagggtatcagcctataatttagtgtgggccgaagaagttagcctaaagcctagcctattggtaggctgggctgggctaggctataggccgggtgggctttgccaatatctactcctatctagtctacagtcccctatatacctaggacaggtactccacacaccctaacaggtacaatacttcaggcatcagccttcttagtactagggtcctgacatttatatatatgacctgatttctgatccaaggggggcctttaatatatagcttatagaccttgagtattgaaattgaagaaagaagcacaagtatcagcaactagtctatatgcaccataagtgactagcaccacaggcaataaattccagggaagactatctagtccttattgctgcctgataccataaatatgagattaggacatgtcacccataagatcttcatccatctcaagtccagcctccacccctacaatgggattgacttcactagaccccgaccaaacttgacccttgtgtaggctatcaacgtactcatcgcttaatcccagattgtgattagttttgccaagattaataaccatggtctccatgagcttcatctcttgcttgagttgggactgtaagtccaactcatgagagagtcgaggtaacgaatggatggatgagaaccgcagcatagaagattcagcatcatctttggtctgtaccaatgtcgcgttcaaatcacgagacatgatgagggatgaaacagcggatccagtaacttcggcggacacaggggaggggaacacctgcttcgagaggtcgaccatcgttaaagctgcgaaggtcttcccaagcttgatcacggtttgactgaagaaagcacccactacctgggtaacaagaccgagattattgtcctagagtggcggcattagccctggatgtcaaaacgataccacctactcaattagcaccacaacttaccgcgcaccagactccattggcagcatcaatttcagcattaagcctcttcaaatcaccacgttcaaatgcatgagcaagaatgatatagggcctcgcaattgattgatacactttagccacatgaggtgttgtgatgcttggaggcggacagagctgtccacaaaaataattagcttgagaaaacaatgctgtcgagtctcctttcttttctttctcagatatcttaccttgcctttttctagcaagcttaccagcacccattttttgtaggcttccaccataatcaagctcacggagttagtactaggtgtagagatgacaatcccaaggaaatgaagtgcattgcgccactccttcaacgccatgtacaccataccaccataaagaaagtactgcaagtagtctcgatatgatagcttggatgaaatccgggaatcttcggtcataaaggatacacctgacccgtgatctgcgcagagcacagagggatcggaagggggacttcccagcgagattgggaaatgacaaatctgcttattcaagaccggcaatgcacaagaatacgccttggcctcgagacaaagccggacaagcaaaaggtgactcgaggtgaaaacggcacatgatgggtcgagacgaagcatagcgtctttgaccagcgtagcacctagcagtggctgtagtagggttaggttagcaattagatataagaaaccttgaaaaatagccgacttgccattgatgcagcttgtgagacttgccccactagctcaataagttggcgccattctcgcccagcgtatttgacctgaaccccatcgaaactcgtcaaaaaatgtgcagcgcatatccagagcttcccagaggggcgaatatctgctggaaatgaatcggcattcagttcctgtgccttttgtatttgcacatgtagcacgaaaagatatgggatagaatctatcgctggatcaaaacgctaaagacaaatacatattagttgcgatcttgccactctatagaaccctctcagatggacttgatacaaataaagctgcttacatcgagaaaagactcatcattagcaagtgagtcgagtgccttggttgtttgtagccgcctgaagtattgaactagctcgcgaacctgacggtcatactcatcgctgggtgggtgattagagttgtgtaactgcgccgatgcggagataatatccgaaaggagtgtcatcctggaagtgtatgaaagagaagcacaagatagctcagcgtcaaatgcgcaaaggtgtgttgtttctaaaaccagtgtgatatcttggctctcgcttttatgatatcaggattgccatacaatagagactcaaggttggacgaggaaaagagagcgaaagaggagaagagagatttggtaaagtgttgtaaaagaaacgcgacgtaggtagttgtgatgattattggagacatctggacctcggaaaggtgggtaaatccgagacgagcgggatcgataacgtacccctccacactgagtgtgactcaattttttcttttctctttccctttcctctacttctacaactttcacttctctccgacgattatcgttcaatctatataggagcggaggttatttggcaccatgtcattgaccgaatccgtagcagttgatgtcgcccatagcgcatcacttgcctctcgtcgtcttgcaactttaaacaacgatgaccgcaataaagctttgacgttgcttcatgatgcattggaaatgaaccaaaaggacatccttgaagccaatgctagggatgtgaaacttgctactattgcagccgacaatggggatttgagccatagcgtgctcaagaggcttgatctgtcgcggcctggaaaatacaaagatatgcttgatgggattttgagtgtgcgagatttggatgaccctagtgagtttactttccaatctttaagcttcattgagacagtacttaatagtatacaatcatagttgggaaagtcacactgcgaactctccttgacgatggtctgacattggagagagtcagctgccctatcggtgtgctactgattatctttgaggcccgcccagaggtaatagcaaacatcgctgcgttagccatcaagtcgggtaacgctgctattctgaaaggtaacacgcaagcccttataaaggtttcatgatattgttccattgacgcaaatttctaggtggaaaggaatccatggaatccttcgcggcaatcgcgaacgttgtctccaaagctatcgccgaatctcgcgtaccggtatcatcgattcagctggtcaagacacgcgatgcggtgtcttctctcttggcccaggattcgttaattgacctggtcattcctcgaggttccaacgaactcgtccgtttcgtgaaggacaacacgaaaatccctgtgcttggacatgccgatggcctttgttctgcttacatacatgccgatgccgatatcgatactgctgtgaaagtgattgtggattcaaaaaccgactatccagcggcatgcaactcattggagaccttgcttgtccatgaggatacccttgaattggtcttcccggcggtagctgctgctctcctagagaaaggcgtgacccttcgttgtgatcctgattcaaaatctgctttgaccaagacattgccagccgagaaatcagtgcaagtacaaacggctaccgaatccgactataacactgagttcttggaccttgtgttggcagtgaaaacaattccctcgactgaccctccaatcgcggccgtggaggctgccattacccatataaatatgcattcctcaaagcataccgagataattttgactcggtcaaaagaagcggcggatatgttcatgggcggaattgatagtgccggtgtcttctggaatgcatctactaggtttgccgatggcatgcggtttggatttggtacagaagttggcatcagcaccaacaaaatccattcccgaggaccggtcggacttgagggcctgaccatctacaagtacttgatccggggaaatggtcacggtgcagcggactatgacggtgaaggaaggaaaaaatatctgcatactagactgcccataggccagtaatcgcctccagcgcaacgcatcaatagaaggatatcattttagaaaatattttttttcttgctttcttgtttgaaaaatcccataagaaaaaacttaggacaaagcctgattcaattttcttttgccccttcattcgtaaattctcatttcccagtccaaccaaagacatcccgccacttttaagtacacagacttgaggcctttggctagaactgaaacgattccaggcaccgagaaagtcaatgtggccaatgcatcttttacaatacatacacaccgcattaccctcatcaagtcccttagaccttgaagcccttggaccttctgcgtccacgggcccgctcgaacttgcggcccttgcttgccacatacggcttctgttttgagtcagtaaatttgaatcacataatctcgttttccagtagtcgtaatcataacgcaccttgtcggtgtgaggaccgaagccgaagtgcttcacggcctcacgggcgttcttaggtccacgcaggaggagagtgttggcaccggtaggagcgcggagagcaagctggtcaagagtcaaagtctcaccaccagccttctcaatgcgagcgcgagcggtagcggtgaaacggagagcagcaatcgacagcttagggacggtcaaaaggcggttgtcatcggtgacagtgccgacaacgacgacggtcttgcccttctgcgcctcgctgatgttggcgacagcgcgagaaagtgaaacaggggggcggttgattctcgacataaagagacgacgaaggacggccttgttaaagttggactcagtgcggcctatcacgcatctcatatcagcctcacgaaaatccccacaacggtatacctgtagaaattgcgctgcaaacgaatttcggaatcgggaggagggggggggggggggggttcaaaggacacaannnnnnnnnnnnnnnnnnnnnnnnnnnnnnnnnnnnnnnnnnnnnnnnnnnnnnnnnnnnnnnnnnnnnnnnnnnnnnnnnnnnnnnnnnnnnnnnnnnnnnnnnnnnnnnnnnnnnnnnnnnnnnnnnnnnnnnnnnnnnnnnnnnnnnnnnnnnnnnnnnnnnnnnnnnnnnnnnnnnnnnnnnnnnnnnnnnnnnnnnnnnnnnnnnnnnnnnnnnnnnnnnnnnnnnnnnnnnnnnnnnnnnnnnnnggggggggggttcatacgagccaagaagcggtagagcttcaccagaaccttcaagtagacgttgtcgctcttgggagccttgcggtggctgctccgcacatggtggcggtccaagtcgatacctgcaatttatgaacggtcagtggaatgaactgacaacgagaagaaaaagcgaaggggttcgaatgaatgctgcgggatgcgataatcgagtaaaaggagatgattgaacatacccatggctgtgtattggtcgacttcccgggaaatagcttgctgtcgcacccgtatggaaagtgcaggaggtttttgatccttgactttcggctggacagtggtgtgtgggtttagccctacgctagacctgactaggaaaggcgaggcacatgacctaagtaaagccacgtgacttgtacatgtttccattcgccacttggtcacgtggtgtaggggtctggttgcatctaacaaatgaaccttatcttcagattctgttagttatctgccgtgcactctgtacgtctacatctccaacctacatcaacatcaacaattctgtataacagaacatttcatctactctttatctatgtgtatatatgcattatgtataatcaaatgttaatgataaaaatgagaaaaatatatctaggcacatatgttattagaactattctccatcattcaagccgacaaagaaatcacgagtcatttcataactcaaccagctgcttgccatactaggagcaactttcagaagattcggccctatccccttgaagagtccacgtagtccctcttcagccacgatgaccctcacagcatcccagatcgaggtgtattggtaacccattcccgacattgtgttgatctggaatcgccgacgtaggacatcactaagggaaagtcagtttcacggggcctagccaaatagaataagataaccgacaaaggataggtacaggtctgggcgactgccccagagaccgcgccggcgagtaattttcgacaagagctagggtttttgtccccttctggtgttagatacttgcgcgccgattcgtaggtcatgaaattgagtcccacctgtggttcgtcagttgtgaccaagtcaaattaagctgaaaactcacgtatggagctaccccagcaacagtaggaacaattccacggtatagagcctttgttccaccttcattcttatagatcatggttattgtcgtgaacatgcctggcagtttctggcttggatctcttgctccaagttcggcaaatgaagcagattgaatggaaagtcgtgttcgaacaatgtccagaggataggtgatagtcaccgaagtgataccggcaaggccgccacaaaaaaggcgaagcatcggggtcatctcaccatcgggagactctacgaactgaatcaaagaaatgtcagtttgcatcaaaccctagttctgcaggatagaaatagccacccacttgcttataaaaattatagcttccaaactgtaccgcagagtaggggataatgcgaatacagtttgttccatttcctcgcatgaagccccgccagccttcttcccgccccatctttactaaggctttccagattgacaatctgtattctgttcgaccgacgctttgaatctgaagaaggattttcaatctttcgagtggcgacactattgtcctggaaactgcaccagccactccaccagccataaatgcagccaccattggttcggcgaggtacttcctagtacgaacccagattgagggagttttctccttaatcagctcctgcttaatcaactagtcagcctcgcagcgcatatggaccggagatccccttctcaccttagctgcatttgaactagatggaaacttggatagagtctgcaaggcaggctttggatcaccttccaactgctccttttgaacatcctggcgatctaagctcatcttgacgatatgcacatccggttcggcaatgaggttgataaagaagtcctttgtgatctgccgtgtaatgattttctgaaattattttaattggagaatgatgcttgattgtcgctgaaaatcaaatgcgatataacactattgatgtagtgctagccatgaagattgattgttttccaaggcttggtgatctaaaaacacatcattgattttgtgtcaagtggtgtattgcttttttttccaacggccatataactgaggtataaagggtaatgttgatagtggatttgccaaaaaggagaagcgtcgaaaagaaaggacgggttgttgggccggagttgcttttcttttccccttcaatgttgggaggagatgtcgttgaacaggtcaagagaaagaaggaataagaacacaaataaatcacacaagaggtggtatgtatacctggaaaaggtgcttggaggtttagaaagagaagaacatcccgacttaccgacagacacggtacctcccgatagtccgccacttatattacgtacctacattggggggtccacgggcgaactagttacatagtatagttccctcaaaccgattgtataagtactccagacagatcaaatctagatctagatctatgatttaaataaagaatattacacttgtcaagagcctatttatcaataccaagtttctctcgtaaaataaaacagagaagaaaaatcaaagaaaccaaagaataaacctttcatcaattgcgtcattggcatgtttgatccaccgtagcacctttatcacgatttctttcttgcgccctctctctcttccttatactctttatcctcttgaagcttcttaagctccatctctcatttcaaattcttccaaatactttccaactgacacaatcttctttatttttcattgctctgtgctaacggcaccatgtcttctcgctctggaactactctgtatgttaccgggtttggccatggcacccgtgctcgcgatcttgcctacgaattcgaacggtacgtgtcgcctataccttcgcctctacgaacttcgattcccatccttccgacgacctcccgatgaagaccattggcactaaatgccttggacgacactcttctttctactagcgtgacattggtgtggaagcttgtgtctacgttgccccgtctcactccttgggcaactgtcagctagtcttggtcattccttatcataatttctcttaataccgatacctgaagctagctcaactgattttggaactagttatgggcgtcttgttcgctgtgatatccctgccccgcgcactccctctagccgactgtgagttgaaatgatatctgaaaccactttacctgtctaatctaagtcgcttagtttcgcattcgttgaatacgagagtcgccgcgatgccgatgatgcttaccacgagatgcacaacaagcgtatcggccgcgatgatttgctgaagattgaggtaagcatatccgcccccccgaagctttgttaaatatcttttaacctatctccagtgggcacgtactcctccctccgcttcctggcgctttgactctggctctggccgtgacgctccccgtgacgctccccgtgacgctggccgcgatgctggccgtgatcgtcgccgtgatcgcactcctcctcgccgtggtcgttctccatccccccgtcgtagccgtggcggcgactattccccccgccgagatgatcggtacgaacgtgacgccgaccgtaccgaccgtgactacgaccgccgcgaccgtgatcctgaccgccgtgaccgtgaccacgatcgacgtgaccgtgaccgttctcgtgaccgctctcgcagccctgacgaccgtgaacgcgatggcaaagatgaccgggaaagacgcgatgatgatcgcgagcgtcgtgaggaggaccgtgaaaacggccccaacggtgaggacaggaaaggtcagttgcctcggaatctaacctagaaaacgttcttttcactcacatacagcagtacccctggacccaatgccttctgctcatgatgagcttgatactgctgagtagataaactcagtattacgttcattcgctctcgaaccatgcccccgtcgtcattcttttttcgtcttctgaaggtgtccttcattgcggttgagccaacggggagggaggatacaaagttatcgcccagtgtttctcttaataccaccctgtggcatatctcgtatctcgtccccctttgcctcttgtgtgcttctgatttcaaatggcatgaagcttgctcttcgggacaagctggagccaagtgaatgtgtgacccttgctccccctaccttttttttttttcgaattttccttttccccaagttattcccaatatttcttttttgaggttggtaatttatcctggtcagcagctcggatcccaccgaagcgaacgtcgagcgaccgttccaagtcggcgcccaaaaaccacgatgaaatccgtttcgcccttcgtcttgttcgcaatttaatttgaaagcggttatttcaattcctcgccctctccgaccggtcgccatcctatgtggtctggtattttctaaaccactgtagtgccttagttgtatgtgaggtcaatgcaaagcaccagttctatggctttgttaataacaaaaaaaagcaatagaatttctgagatcatgacatgacgtaagctatttggcgcggggaaccgcaatcaatccatcaagcaatccagtagaagcatccctgaagcccaaattattgcagctttattcaactttcagctactttatactacctcctgtcatgagttcagcaaagaaaacaggtatcagcattgctatcgatgtattacctcccccttcactactttattcagaacactgacataacaaagagaggcggcacatttacagactgcattggaaatccagggacaggccgcttggaagatgacattgtgattaaactgctctcagaagaccccaacagctacgaagatgcacctttggaggggatccggcgtattctttccaaatttaccggtcatgaaatccctcgtggggaaccaatcgatacttccttgattcagagcattcgcatgggcacaaccgtggcaacaaatgcgctactcgaacggaagggggagaaagtggcactagtggtaagcaagggcttcaaagactgcctcgagattgggaatcagtctcgtcccagaatatttgaccttgctatcaaacgtcccgatgtcctttacgaggaggtggttgaggtagacgagcgtgtcactttggaagactacgcagaagatccgcaacgaaacacaactgccactactctccgggaacaggcccgggcagaagacgaggttgttcgcggcctttcttcggaagcagttcgcatactaaagcgcccatctgagggcttggtgagatcacaactgaacgaggtatatgaccgcgggattagaagcatagcagtatgtcttatacatgggtacacctttccagaccatgaggcactggtgggaagaatcgccaaggatattggtttccaccatgtgagtttgagccaccagctcatgccgatgattaaacttgtgccgaggaccacttcagcctgcgccgatgcatatttgacccctgccatcaagaagtatatctctggattccaagccggatttgaaggtggtctaggcagtgaaagtgtcaaacagcaggcgagcgccaaaggtgctcgctgtgaattcatgcaatcggatggcggtcttgtggacgtggaccaattttcgggcctacgagcaattctatcagggcctgctggcggagtggtggggtatgcgctgacttcctacgatcccttgtcgaaaataccagtaatagggtttgatatgggagggacgagcacggatgttagcagatacggatccggtcggtacgagcacgtctttgagacaaccactgctggggtgacgattcagtctcctcagttggatatcaacaccgttgctgcaggtggtggctcgaggttgttctaccgtaacgatctcttcgttgttgggcccgagtcagcgggagctcatccaggacctgcatgttaccgcaagggtggaccactcacagtaaccgatgccaatctgtttcttgggcgattggtcccagacttcttcccgaagattttcggctcagatgaaacccagggactggatgaacaagctagtcggatgttgttcgaagaattaaccaaagaaatcaaccacaagttgaccaaagggggccaaagtcgagaaatgtcccctgacgaggttgccttcggttttatcaaggtagccaacgagacaatggcccggcctattcgatccctgacagaggccaagggacatgacacatcaaaacataggttggctacgtttggaggagccgggggccaacatgccgttgccattgccgagagcttggggattcggcagattttgattcatcggtattcctcggtgctctcggcatacgggatggcactggcagacgtcgttgatgaaaaccaacagcccgaatcgaagacctgggctgatgatggcaaggaggaggttcggtatgcactttcttcaagaatggaagaattaaagaaacgatctacgcagaggctgcaagaacaaggcttcgacaatggttcaattgtgtttgaagaatacctcaatatgcgatatcgaggcacagaatctgccttgatgatacttaaaccaagcaaagaggaggccgatcttcactttgggggcgacgaatgggcttttgggaaggcatttatgaagcaacacgatcaagagtttggttttactctcccagatcgggacatcattgtggatgacgtgcgggtgagaggaatcggcaaaggattcaaaatgtccgagaagactgtggaccggcagatccaggagtccaacccaaaggatgtgacgacgggccaagaacatcgcaggtctcttgtatacttcgagggcggccgacttgaaacgccaatctataaactcgacgacttgaaggttgatgagcgagtaagaggcccagcgattttagccgatgccactcaaacaatcgtggtgcccccagaagcttcggcgctcttgacaaaaacccacgttgtcatcaatattggggaatctgatgccagccagccaaagattagcactggtaatgtggatcctatcctgctgagcgtcttctctcacagattcatggctattgccgagcaaatgggacgtgctctacagaagacaagtgtaagtaccaacgtaaaggaacgacttgactactcctgcgcattgttcgacgcagcaggcgggcttgttgcgaacgcgccacatttgcccgtccatctcggtagcatgtcaacatgtgtacggatacaggcccggatctggcaaggtaaattgaagcccggcgatgtgatcgtgtcaaaccacccggaatttgggggaactcatcttccagacatcacagtcctgcagcctgcttttagcgagggaaagatcatattctacgtagcttctagggcgcatcatggtaagaccccccggcgaaagggagaagggggaaacaaacagatatactaacctgcatgaagccgacattggaggaatactcccgggatctatgccacctcattcaaaagagctttaccaagaaggcgcagccatcaagagcgaaaaattggtatcagaaggcaagtttaacgaggagcgcatcacagaattgctgtacaaagagccggcccagtacccaaactgcagtgggacgagatgcctagcagataacttgaatgatcttaaggctcagattgctgcgaataagaaagggatcaacttgatcagcactctaatcgaggagtacggcgaggatgtcgtgcagttttatatgcaccagatccaagacaatgcagagctcagcgtccgcaatctactaaaagacgtgagcaggagatttgctggtcaagaactgagtgctattgattatatggacgacgggagccctattcaattgaagatatcaatagatggggagaaaggagaggcaatcttcgattttgagggtacgggcccagaagtatacggtatgagagtggctttcaaggtgaaacctgatgtatgagctgacaatgacaggcaatatcaatgcaccggaggccgtcacatattcagcgatcatttattgcctgcgatgccttatttcagcagatatcccattgaatcagggctgtttaaagcccattgacgttcgaattcctcctgggagtcttctatccccctcggaatcagctgccgtggtgggtggcaatgttttgacggtaagattagacagatactgacgttgatcatgggctcatttcttatttcttcagagtcaacgagtgaccgacgtcattttgagatgcctccaggcttgcgctgcgtcgcagggtgataccaacaacctcacatttgggtttggagggaatatgcccggtgagacagaaacgaaagggtttggttactatgaaaccatcgccggcggtagcggggctggtccgacctgggaaggcacttcaggggttcatacacacatgaccaacacccgaatcaccgatgcagaggtgtttgagcggcggtaccctgtgatcctccgagaattcagtcttcggccgaattcaggaggtaatggtcaacaccgcggcggggacggcgttgtgcgagacattgaattccgtattcctgtgcaagtctctatcctctccgaacgaagagtctatcatccatatgaattggagggaggcgaggacgcccagtgtggtcagaacatctgggtgcgccgcgtgagaaagcatgacggaagctgggaggaaagatatatcaatctcggcgctaagaattccgctcagatgctagcaggggagcgaatcattatccgtacgcctggaggaggagggtggggccaaatcggagaccagcgccaacttctcgaggagaaagatcatcgtcatgcttggcgggggggttctattgccaacaacatggcgacgcaggaggcgagtatatgatttatagggaaatttgggagtgagttgattcaatcggccaaggtcaatttgattatgataagaacgacaagggctatttatgggcaacgtaaattaaatcctccatggcaattatgcttcactctcctcatcacttgtcgcctcaatattctgctttgatagaccttggttgtccgaatgagcatgtccttgctctccttgatcggacaggccaccctctgccgagtagacaggccgaggcagagtttccccattttctttcaatgcctgctcaatctcaggtagaatagagacgatagtagcgaattgatccacgggcattgagataccctacgttgggaatgagagtattagcacggtttatgaaaactgactgatcaatcaaccttttttcctggcaactcctgcccgtccttttcatagtattctctaacattcacctgggttttcccacggaaagaagatatggtcaggcggcgcattttggatatttcccaatagcgatctccattagagtcgattttggtttccgctgtggtattgaccttggccttcttggggcgcacgctattatcaaggccaacgccggagtcagacgaacgtttcctggatgacatgacttgaatatgatattgggaaatgcgattgggagaacggatagaaaagatagaaagagtaagaaagtggaaaggtgtccaagcacgaatgcgaaacgcgaaacgcgaacacgtcatcacgtgaagaccaacattatatactccgtgttcatctttgacaattcctacctacatgtggtctctcatgtatattccaatatgatccattgaacatttaaagagtcaatactctaaggccctgtagtaaaatcgagaagacaaatcctcgagcgacactctcaacttgaagactatcaaagatcttctctagcgcttctcgactagcagctgcccccataacacttgttaaggcctgtggaattccccgctgcacaaatagtttacgtgcagtatcccgtaatcggatcttctcctcctcactgggtggagagggccaggctttaagttcctcctctgtcggaagcgcgttctcacgaagcttgacgaggtaataccccagggcgtcgtccgaagtgtggccttctatcatggaatcttgcaacagcgtacgaatagtttccaatgtcgggctgccgggacgtagaatatacgatttggcagcattcagaagggtccggcgtatgttccacgcagacgacaaggtgtacaactcattgatgaccgcaaagatcagctctactgctattttcgtctcatcagctgtgatgggattcccctgattgcggggtttatcaatactctgcccagtatctgatcggcgatgtgatgaggtttgatcaatagtttccgttgcccggacatcaagttctgcagtatgatcgctgatatcaagtgaggttttagagggtgagatctctgtggtccatgcaccccgttcactctcaaacgactctctggtactgccaaccgaagacgacttggaaatttcgcctccttggatttccagggggtcgctagggaacaccataggcgaatcaacgttttcgttgcttacgtcggtacgatcagcaaagctaaaccgtgtctgcgaccggatggcgcgactggagtcatcaactttgggttgaatctgatcagcaccgacagccggtttcttgccattggcggtgccgccaaacacccctgtcattccttcaaagacggctttaccgccccctgccactcccctgggcgcattggtcaatgcacccagcatacccttgcccatgtgttcaaacgcaatttgactagggaaagagaatcccggtttgttgttacagctaggttgagtggaagcaccagcgtctttttgcaaaaatcgccgcattcgatcagtgtcggcaagtgactcgtgcttcatggcatcttgtaaataccacccaaggtcccgagcgagagctagtcgtgttttgcccttccaggtgggcagtatggggtgacgctccgagaaactcgaaatctgattcaatcgtgaaacggtccccagtatctcgtgaagagattggaagtccgaatatttgcgaaacaccatccatccagtcgagcgtgttgacgctggttcgacctgtagcagataatcccacacgggtcgcgacttgatttggcctttttcatcccttgctccatcatcatctaccaacacttgtgccccatgaagaatcaaaggtggcacagaagagtcttcgaatgatttcgggcttgcaagtgattgcgtattaggtatcggcccctggtcttcgtggttttcgttctcatcagtcgtgtctgaagccaaatcagtgttcaaagggtaattttcgtcaaattgttcgttttggcgcgtccgttctgactccgagttctgtgtatcgtgggatacaatcatagcactcagacgtttcacctctagaaccgcctcttcctctgtagccctcgctacatgcatggaatctctctgtgtggctttgacggagtctgcctttgggtgttctgaagacctaggagcactgacaccctggttccgtgcaccctcaacgcctgcgtcgatagcgtgcataatttcggattcaccgccctgaagaagatagataatccattcattgataaattcaggacgggcaagactggtaacagttgaccccaatatcacgcccgcaaagacctcacggaggaagtcccgtacagccggataattgtaggttttggcatccaagaaattcgacagtatgtcatccgcgatcatgctgagttttttcttttgttgttccgcagacaagacattcgctaggctgctatccgggaattgttcaaggtattggtccacggttttttgggcttccgtcggggatgagctcgcagcagtgaatgctgctgcaagttcattcaagaatacaatgacgatagatgaggagttggtgagaaactgcaagaacgtgtcctctgttcgtttccgcgagaggtgcgaagaaactgaagtaatgaaatgagtcaaaatccttcgacaggagtctggaaaacttggctcggacggtaaaagtggctcataccagtatctttatttgggataagctacttgtttcacggttggacaaggggacgttaatagaggatacttacttgacataatcttgaatgacagcatcggtgagcgttctcagcgcgacagcggtggccggttggaaggtggcatactccaagtctgccgaagacatatcttccagcgtgtttatagaaccatcgtccccctggatgtctgaagcaccagcccgcctcggccagtctaaaagtctgttggagacttccagggcaagttctctacgccggttgggcttttgcacgtgggacgcttcttctccgtgttcgttatctgatccctcccaggacgcgtgtaggacaacccccacagccactccaatcagaagtagaccgattctccccaggacaatataggtgacgagtgcaagaagcgcaaagactccaaggagggtctcattggtagaggttgagagaaaattgaggatagcattgatgagttcctttgagatcgctgtatttaagatgggatctttcgtcgtgggagtattgtggtctttgtcggatggagctgaaatgacttcggagtcgtcatcactgaggcgactcattgtgctgagatatcccgggtttggagggtatccagagtaactttagttaaccctccatgtcaaaatcaaatgtgagtgaccttgtagatctgtgtagacaagaaaataaggggatacataactagcaacctgggaaaaatgcttggcggacttggccagtgcgtacatacctgacactcgtactccggtataagaaaagaacatttagacttcatggatgtacggaaaaccatagacaaagctaaaccgtatatataatgtattgtatgtatccaatcatgatttccttacaagcatgagctatatagcaaggaatctaaagctaacagaaaggagttgatcttcgctatccgagtgaatctgagcattcaaagagcatgcgcttcatgccagatgtaaagagattgcggttgggagaaagaaaagggaggtactctacaggggataacaacgacccaaaaacgacccaaaaacccatctggtcgggatatacttagtatatgtggcccttgggcaacaaaccaccagtcctcatgcggcgttcatcgagaggtacggtactcacttcgatgaaatccaaagacataaattccgaccgcattaagaagaaattcatggattgactcgaggaaataataccgtcggagattgatgaatggtcatgaagaaaactggaggaacaaagatagacaacaaagaagaacgaaagattttgtaggggaattttatattacctaatacttagccgacaattcctcgacgctagtcccattacagttagattacataactggagccgaggtcagttaggtgggcatacaagcctcagatagtgtagtgtatttttccaatcatttcatctatgtttttgttttcgtttatgcctctgtcttctagaaagcatctgcgagagcataaagtgattgacatcctcatctccccaataggtgagatggctagcaatgctggctatcaatgagatatcgaaggctcccctatattccgtcaacaaggttcaacaatgcagggcatatagtcttactcttggatgctgtagtccacacggccgtttgcattcaaggcacgcacttttgcgtcctcgaatttcagcctccgatcctggttagtgtcggcatcgggatctagactctcgccatgatgaacactcctgcttttttggaaaccatcgtaaagagtttctagatcagattcaatcaatgtgtgatggtgatcgtcggatccatcgggtgtatgctgagctgagcctgactgtgaccgtctatggattgattcatcacctattttactacaagtccgagcagccgatgaggcgtcatcgccattcagacccaagctgcgattcaataaactgcttgcaacacccgtggtaaaatttgtccatagggatcccacactttggcccatgcggctaccgagaatagacagactctgaccagaggtcgtccagaggcttttcttcaccgaaggtagaggctgaggcttcagggttgccatcgctggagatatcaaaggctcgacccggtagctcaccgggtcagagggatggaagatattgtagagatctcgacaccttggcgttgagatgataccagcattgtcgctgagcgtatgtctaggaccatgcgagtccaagtcgatctcgacatccatggaatttttgcgatttcggggacctaaggcagagtatccaccaatcgtcttacccttaagcatttgaaatagtgcaatgggtgatcccagacagaaaaactcttcgcagtcaaactcaaacgcacttgaacccttggggtgggccgagtcgtcgctctcatgggccattcccttggaggcaccattctgtccggtattgcttcctggctggtgacacaagatgtcaaatagaatcgcacttccaagcgaatggccgcagagactgactgaccccttaaaagaagggttttgcttccggtacagccggaggattcgattgcattcttggatgacaatattggagatatgttcacagtacccgctttggtacaagagtacatccatagccaaatctgaaatgaggtttcgaacagcaggtacactttccagtgttatatcggacaagctggggtaagcatcatcctcgagagcgtctgcatcagtaagatccagttcttttctgttccgccgaactcctcggtaaggaaagtccagaagatggcgccagcacctgctgaaattagcaaaaagaaatgccgagcaaaggaatcagtctcacacaggaagcacttgaacacggcagttcttatcgctgtctggatgcgccgagttcaacgcttggaggtcaggtgaacctttgtagacagtttttagcgtcttgcgaagcacatttacatcgtgtatgaaattgatgctttccagtcgcaagccgagtcgctggccaattccgtgggtgacaagaactagatgatcaacctcgcgctctctgtccgcgccgtccacttcccttgattcttccatctcctgttcctcctgcctacgagcctgttcctcgaggtcagctggattttgcggctcgcctgcgagggaggacatttggcgttctaatgttgatttcgatccactttcgtagtccttgaacccatcagaggaggttgacttgtctgtgtctttttctgtcttttctttcaaggcctcattcaaacctttggcggggtttgactcgcccagtggtttttgtttaggaccctttgcttctggtgtctcttttggctttctgggctcgaaaccgcgaaccaactttgttcccggaacgccccctagcttttgatataccgaagtactgaagcgtgacatgaaatcatcgttcataagccaggccgtcgtggaatcttgataaccgactatcctattcatgtaagcgccaaagagacgatactgctgaggctccactgtaggactaggactgctggaatcattccctgcggtacgaggagaagagttcgggttgattgattgaggggatttgggatctggctcaaaggtgttgattggcatctgaccagatctatcttcttcgtttgcttgcgaattctgttctgatggctgggacctccatggacacaatttgatatagccctcttcaagttgggtagcaaggttttcttcacatggttttaggctagatccatcctgaatgaaccacgttccacgacggacttcatacacaggaccaatccaataggtaggactcaattctcgttgttccacatcgacattgaaaagaaaatcctcattcacaggcactttggtcaatacaggttcgctgtcgtttggcgggttctgttggcgggcatcttcgatgtctgagagtttctggaacatcgcttcaatagactgagagtctttccctgggaaaggtatgaatttcttcggcgatggtaagggcttttggtccgcctttttctgtcctattatggacggtttccgcttgggcgagtccactgcgtagaaccacctgactttcgatggagggcaatcgggaggatagcgtcgcatgcttaatcgatgcatgtgggtcaccgtgtggtcctccccttgcgaccgctgcaagacatcctttttctggtgatctccaagctgcggtgttgaggttgcgctttttggtgtactccatggagtgagtgtccccaagaacgacttctgctctgcacccgccatggggaggagcgcccgtcggaaggtagcgaaacaaaccaacgtgaggagctgggttgaggaacagcgaaagtgtcggcacgacgtatgaacacgaatagagaaagggccgcggccaaaaaggtgttcaaaacggtaggcaggtgttggcgttgcaatgaatgtttccaatttttggagatgggaaatgatgtaatcccaatttcatgcaattacgttgtaatgtacaatgttataccgtaccatatcaacaatgtccgttcttgacataggcccgttaattatagatatatacatatttctatataaggtcccaattccatgtattcatctttcattgatagtctaaagagttagggactataagccgtggatacgtcaaattcccgaggtcggcgtatatatggctttttctcagtcaattgtggcgaacaccagcataatgaccagctaggtagatgaaatagtttcatgaaaggtcaccatgttatatatactacatagataggtaactaggtaactaggtaactataacatagtatatatgtaagatgtcgacgtcatcagaagaacttcaacgttccccaatacgataatacgagaacacggcgttactgacatgatacttacgctctcatacaacaatacccctggcgtgatgtactctgtatcgttaaccaactactttcattacggtgtggctcgtctccccctcggttcgtctatacctggctgcctttcgctttgcactgcccaccttgagcacgcatcggatttcttctgatcctttgcttactttacctcttgacaattgatctggctcagggtgtaatctacttccctccttttttttttttgtcgcaacacagtctttccctgggtgaacccctcagctgttttgccccagggttgtgactcctgacaagatgaacgtcttcaagcttcagaagtacattctctctccgttcaataaaaacaatatgctgaccattgcgatccatgtaggcgttttccgcagcttgatcaaggcgagatattttcgctccaggatgcattcaacagattggacgtcgaagaccgtggctaccttgatgaatctaccgtgatcaaagctgctcaacaatcagaacgccagccatatgatgtggtgcgtgcagctttgaaggatgtggagctcgacagctcccggcgcgtggaactcgaagattatgttgatgtaatacaatctccccgcttccctttctcaccccgctggtattaatggcatagcagctcgtttccaagctccggacagcccctactgaaggtgtccgcgcagcagctacccccgcggctgtgatccaagaggccggcgctggccctggagcatctcgacatgtctccaaaggcagtgtgggtggacgaatccatgtccaaggatcatcctccaatgtcacgcatacgatcaacgaggatgaacgaacagagttcacgcgacacatcaatgctgtcctggcgggcgatccggatgttggcaacctcctaccttttcccaccgatacatttgagatgtttgataagtccaaggatggcttggtcttggcaaagttgatcaacgatagcgtaccagataccattgatgagcgcgttctgaataaggccgggaagaagatcaagcagctgaatgctttccacatgaccgagaacaacaatattgttatcaactctgccaagggtatcggatgctcagttgtcaacattggaagcggggatatcatcgaagtgcgcgagcatttaattctgggcctcatctggcaaatcatccgccgcggtcttcttggaaagattgatatcaaacttcacccggagctttacaggcttttggacgaggatgaaactctggagcagttcttgcgcctgcctccagagcagattcttcttcgttggttcaactaccatttgaagaatgcgaagtgggacagacggtatgtaccgcccgagggggacacaaataaagacatatggctaaccgatgtagggtgacgaacttttctaccgatgtcaaggatggcgagaactataccgttctcctcaaccaattggcacccgatatctgctcgcgtgcccctctccagactcgagacttgcttgagcgggctgagcaggtcctccagaacgctgattcccttgattgccgcaagttcctgacccctacctcattggtcgccggaaatcccaagctaaaccttgcctttgttgctaatctgttcaacacccaccctggactggacccgattaccgaggaggagaagcttgaggttgaagacttcgacgctgagggtgagcgagaggccagagtcttcactctgtggttgaattcattggatgtgcagccggcggtcaactcgctatttgatgacctacgcgatggctctgttttgttgcaggcatacgacaaggtcatccctggaagcgtgaactggagacatgtcaacaagccaccagcgtctggtggtgaactgatgcggttcaaggctgtagaaaataccaattattcgatcgagcttgggaaacataatggtttctctctcgtcggcgttcagggcgctgatatcactgatggccaacgaacactcactctcggattggtgtggcagctgatgcgccgtgatattaccaacacactctctgcgctagcccagcgcctgggcaaacgtgaaataaccgatactgagatgatccgctgggccaatgacatgtctagcagtggcggcaagtcttccacaatacgcagcttcaaagacaaatctattggatctggaatcttcctccttgatgtactcaacggcatgaagagcagctatgtggattacgatctggtcacgcctggtcggaccgacgaagaggcatacgcaaacgctaagctttctatcagtatcgccaggaagatgggtgccaccatctggttggttcctgaggacatctgtcaagttcggtctcgtttggtcactacgtttattggtaagttaacactttcgtcggtatggcggaaatttaagtctctaacagatgataggttctcttatggctacccacgagaagatgtaaggaatacaacagctcactttgggcaatcgcaatttttatggcattgcataccttttactttgtttcctcaaatacatgtaaatatgtcgcttctcaaggccaacctaaccaagtgtggatctcaattgaagttttattgttatcatgctagatatttccctctccgattgattaaaggtactgatcaaaccatgcaactgcctacaaaaaagtcagactgtttggcaaagcgaattgttagcttggtgatatctgcgcaaacagcaaattcgtgctcaacgccaccgaacaagttgatctggtacggctggccagtcttggccaggatatcctcagattcatggcactttggggccagaaaaattgagaaaatatttagtcccggcgctataaccggatcaagattgtcggccgtcccaggccgtcctttaaatcttttaatgatgctttacttagatatgaatgaattaatctaaaagataagcatgaccaaagctaccaaaaattccacgccgactccgactagtggtcataaaattgcaaatctcaagggtataatgccgctcaagtgacagaaacaatcagagattctatatgacagttgattcaacgaagttaataaaagaagtataagatccgcggctcgtacccgaaaccggatacaagccctacctgacctggtactccgtatagctggctggtatactgcgagaaacggggtggaaaggagtacagattttgacggcgtaaaacataacacaaaacagcacgaaggcagtataagcaccataatcttgagcaaagtcttgcaaacgaattcacccccgagttaattaccagctgcagcaatggacagcgggccttggattgcttgtaattcctctgcgtcgacgaaactagtgtgtgcgacacaggcaacatcgcagggacctggctggaacagtcgcacggcgtattttgtctatatttgtcaactcgggtagcagcaagatatacgaaacatcaacatactccgaagcaatagccgacagcatcgacccgatcgtagcccatgttggactgtgtttcccttggtatcccttgagccacacgttctacacggtctggcagatgacctagaaggcctattagccagccgaccagatcgaagctagcggggcgattgttcaacggctctgggtcaccgtggaataggtctggcatgacgcccagatggccatttgccgctaattggtttgcaatgagctgcgcgttaatgaagcggtgcggtgagcaacaggatggaacgcttgtggaacgcttggggtgtgaaatgtagacctcaactactaccatcagcgaaactgtagtctatttccagagaatcagaagtatggaaatgacgcaacaagcagccggtgaattagattccattaagatacaatcgaaatagcggtacgcgcgcgcgggagagtgtgcgtacaagaagaatatcaggaagaggaagagtacagagaaagatacatatatatcagggtgggatatagagtccgtgcccgtccaatcggaggcggtataaaaaccatgtagtaatcaatatgtaggcgcaatctatagttatatggatttgttgtttacattgaagcagtaaccatcaacggatattcaggtactgtatcaaatcaaatgatcaagtacaagctgcataacagacttggccctgtaaagatacccagccaaaagaggacattgcccaataaacggcgacctctcatcaggcgagtccggcttagcgcaacaagtggtagctgagacatctggaggattagtaggtaacctcggagccgccggaatatgcacagcatgagaagctcatgtacacatgcagataagagaaaagtgatgagactggcagatacccgcgacaaacggtattcgctgatggagccatggtatacatgccgaaataaaaagttatggacaggacggttccaatctcgcgcgaactgatcccacgagaccgagttccaccaatcggaatagaaccctcgatctgcaaacatggtgatctcggccacagcattaagctagatgaacttagcaataaatcaaggtagcaaacagtcaaagagacttacaacacattcccagatcacgtagaatgccagtagatactccatcatgaacggaaaaagcaagtcaccgagaacccaggggaattcccgaagtctctgctgcgcggtcattccctccgctttcatacgcacggtgtccatcaccaccgggtatatccacgattgagagactgcaatcataactacaataacgccgaatgtggcgagggttttctctgcgacatagagccaatcaattttgttggtccgcgggtattcgagctcataaaccaatgtgggcaatgccatgaagtcgcagatatttcttattgtcaagttttgaggatagtgattgttggttagggagcaccggccctttaatccctcagataagaccttgatctcctgctcgagcagttctctgagcgatttcacctggttaggttcaagtggcacaccggtctctatcgttctaataagagataaaagctggtcggtttcatgagatcgagaatagttctgtaggtcagaagagcgttgactaaagtcttttctcttgaggtctatgatctcagcattgacttgtgtatcaattgcagaagagtggcccgtcttggtagaagtagcatgtcctctttctttggctttggtttggccaagacttgctttcagcatatctcgtttgcgatacatttccgatactgccctcattagctcctgctcacaaccggacacaaattgacatacaatagccattgtaagctgcatagctgtgttgcttcatcagcatagccaagcagtgtaatacgataaagaccgtgtgtgtccacggccaatcgcgatggtatgtccaccatataacgactccaaggtatgtagtttgccagatctgcacaggtcagcaatgtaacagcgtcaagggcagattttaagactgacattctgaataagccagccgagaccgttccagcgaatgtatcccctgagtatcactcgttgtagtatcagacaaaaccccgtagaccaacaaaggagcaagtcagtcagtccaaggaccatgacatctttatccatcataagatggataatctcattcttgccccatatgctgccgtaagttctccaattgttggcagcaagcctgaacaacatcaaggtcacccccatccagaagagaacaaaaaatccatggaactggggggcagtggttcccaaattttgaaaagtactcagttgtcgggtaaatttcaggtcttggaacctgaatttccgtttctcacccgactgatgtgagagattgtgcttgagaatctcctgtaaaagctcggcatcctctgcggtgagcaagtattggccagcttgctcagtctcggtcgatgctggttcttccaagtccatgattatgcatcatatactccgtagatagtttcaaatctcaggtcttagagaatggcggcctctgtttttctttccccttagcgcggcaaatgcggcaaatgcgataactgcgtcaaatgacgttctgtcgagatgtggttcctagattggagtatccagggaagaggaaaattatattcgaaagcaaaataaaagtaacaaggaaggtcgggtatcaagtcgaaagagtagacattcatgcaattatatagctgagcttctatcgacttgtcatgcttctccgccttagctctacccctggagttgtttggtctctctcttcttcttattaccattccttaccatgttaccatccattggcccttattcaattgaatcatggataaatcacaaacgccccaagttcgtgtccctggcgaaacccccgaatcaacccaacccgaacccaatgcgactgcgaaccacaattccaccgaggtagagatgggagaaacacaggacacaagccaacctgaacccgaacatgtgcaagaagattcgacactttcagatgtgcaggcagagccagaactacctgctccggcaaaaaagaacgcgggctgcaacttccttgagtgagcattcttttcctaaacatttgcgacacaattactttttcaagatggcatcacctttcattgtcccaatcattactcgccagctcacaacaacttgcagcttcctgacttcacctatcgttgagattatcgttgggaaaggcgacgatgagaccgttatgacagctcatcaatccctcttgatggaagcgccactactagccgagttgcttagaaaattcgaagcgtcaggcccggtgggttctttagtcaaaatccgttccaggtatattttcatatttattatactaattggttatgatcaatagcgacgcatcaacctgtcagaagaggacgttgatgccttcggttgcttcctccagttccaatatacgcgtgattacaccgtggttcaaacggaaacacccggggaaacagttgaagacaaaagcggcgacgagttgctgcgccatgcgcgcatctacacactggcagagaagctaggtctgccaaaacttcagcgcattgcccatggcaagatccataaggtccagagctcacctgatgcggagctttcatatgcccgttacgtatatactcatacaccagcaacagacacgaccattcggaagcctgtggcgacttactgggcgagccaaagccacttgctgcggcaggaggttggggacaactttaagaagctgtgcattgaagtgccggagttttcctttgatgttttgactatcattctggatcgcaagttgaagaacggatcggtggatgagatcaagggaagtgcgcgcaagcgcagaagagacatctagttattgccagttgtacaatcacatatccgaggatcaacgaagtctttttattaatttggtatgaaccttcttgaacagttcaggggcaaatcttgtcaatggccgtagggcctgctttttataaggccaggctctccacctcctcaatgagtttcggggccgtggtcagattctcagaaccgtccttggtgatgtggatgttgtcttcgatgcgcactcctcccacactccaataccgctctaagacctcggtatcgatgtacttaccggtctcgggggcctttaagacgggatcgataatgaagcgacagaaatagatctggtaaataataagtattgggggttgagtaagagggttctcatggggtgtcacttacaccgggctcaacggtgaccacagagccagcaggcaggttagcgcggacacgcaggtagcggaacatggtatccttgtcctcatagttggggttaccaccggtatcatgggtgtccattcccaggtagtgaccgaggccatgcgggaagaaggccacactgacacgcttgtcgaacaattcgtcctcggatccgcgcaggatacccagctttaataagccacggatagcaatgcgatgtgccagcgcgtgaacgtcatcccagcacacaccttccttgagcatcgcaatacattccgtctgcatctggaggacaatctcgtaaatctgacgggtctcgggcgcaaatcttccatttagaggaacaactcgcgtgatatcggcgcagtaagtttggtattcgccgccagcatcgatgagaacattattcttccggcgcttagtgatggggtcgaccaggtcaacatcgtttctgacatagtgaagagtagcacccccctcgcctccagcaacgatagggtggtaagactgctcgcgacacccattggcaatacaagcaccgataatggcagcctcaatctcgcgctcgttagtcgcggttttggaggcctgaatagcagcaatgtgcgctttggtcgagatatcgtttgcctttcgtaaaagcgcaacctcgtacgcatccttgatgacacgagtctcctcgatggcggtcttcaggctggtagtgtttgtttcagcgaagccatggaagcttattccctccgacacctgttcggcgattgcaaaaacagcagtttgtccattgtggtttgaggcgatcgacgccaaagtcgaattcatatcggttgtgaacagaacgcggtccacatcgtacaccttggcagcctcatcgagagacaggggaagaccggaccaaataaccgactctgggttgatcggtggaataaacagagtcaattcatctccgacggcatcgtataccacggcggcattgggcaaaagacatccagtgagatagaagaaaggacgacgttgcctagaccgggattagtgtcagtccagatcctacagaaatgctgcattacctgaatggcatatcctcatcgctatcctcgatcaatcgagttttttgagcctcgaggtagataactccggccccgccatgccgggcctgaagagactcagcgacacgaagagcatgggccttagccggatacttggcagcgagaatggtatccacggtagtcatgtcgagtgaatagtttaagtgatgaagaagaagaagagagatagagagagggagacaaagctgccagctgttatttacaagcagacgaggttacattgcggggcttagaaattatgcggctacttcagggctgccgctgtcaaagggaaaaggaaaaaaaagaccaacacattcacatccgtggagatcatacattatattattcggactcttcatccaatccctctaggactagctctctgaagcagatacatcttcaaactccatctcccattggtccacctccgcaaacttcttgactgccgcgcgcaactcatcgctcacgcaacgagtggcctctgattctgtggattcgaaatcagatatgtcagactcaggtggtgatgacagtggagaagatgatggggatgatagaagcgcttcgttttctttgttgacgccactcgcttgagaacgtgaatacgtagctggttgtttgggacacgatttgtccttaattttcttctctttaatctccttccgcttcggattgcgagcatcggctaatggtttgagcttgctttttcctgcccgtcgcccagataatctttgtgatggatagttcagctcgtcctcgtcgccagatgcggcatcatgctgatcatcactttcgtcactgtaattattggtggcacggagtctgtgccggcgacgtggtaaaagcttgtcttgtaggtttgctgtcgatagataactcggggctttggactttttcgtctgaacaggtcgcggtgtggagtcgccaggtgcaacggagcctgcaggactactggccggtggtaacatagtctggctcaatatttctggaaatctttgggattgtggcgtagcctcgactctttcaatctcagcctcctgatcttcaaattcctcgtcttcaggttcgacgtcctcattttcaggaagttcgtctccaataacatgtcgagagtcatcgtattgaaccggtgtcgcagttggagtatcttctactatatccacaggtgactgtggtatttgaatctcttgggtcatgcgcttgcgcttgcgcgacccgccggacgagagcggggatgcggccggtgacggggatgaattttcggttggctggataagtagtgactttccccgagagagattgagtggtgtcgattcatcattggggctaagcccaccaaggaagtcatcatcatcaaggtcggaagagccatcgtcgtctgcttgcatcatttgcagaatgctttgctgtcgcggccgccgcctgaagttgctcagaaccgaattatcaaatccaggcgttccaggaacccgggagtttgtgtcacctttgcgtccagcgaatgatagcgtagaggaataaccgcgcgatcttgtagggggacgactgccggttccaggtcgactgccggtgcctggccggtcccccgtaggtgaagattcaatcgcttgttcatggcttttagtcaagggtgtttgactgcatggcgcctgtcgcagatccaaggccgaggcacgctcaggctgcacgggcgattgggcgacattggggtcaatttgctgcgttgagtcttctatcgcggtttttttgtgctgactctttcccactgtacgacttcgtttgggggctggacgaggcatagtcgaacaaattgatttgagccaacggagtatgtgatagagccaaaatggttgcgcagctacaaatgcgaaagaagatcgacgcgtttgtttgggcgcggtgcacgtggaccacatgtgacagcaaactcgatacatactatctagtatctagtactccgtaggtcaaacgtacaaagtactgacatatattacttgatatatatttcgtgcaaatgccgattatattctatatctactagcttacttgtgcttttattcgcttacatttttcctatccgatgtgctacggactcaccctcgtaccgagttgggccaactgttatacaagctcggaaaggctggaatacattgtcattggacgacctcgcatatatatcaatacctgtgccctgaattctccgggcaattattttggatatccctctccctctttatgtctatactcatctccaagtatggtctgatgcccgtcatgctgaccaacccctttgggtggaatgcgacgttaaatacaactagacacaatcccagctttgaaaaatgaatttgctcacagagaacgcgacgatagaccccatcggggactatgcagttagcgacatatccatcggcaagaaaaagcgctctaatgcagaagctgttgaatatccaagaagacggacaacaatagctgtaagcgcctctggcacatttgaccaaagcaggactcttcaacaactagtgtcagacatgccggctacgcaatacccgatgtagtggagttcgtgccaaatgtgttccgatttgaatgcggaatgtgtctatcgagaacctggtatcaaactcgacactggcggcaaactcatcctagatcatttggccagaattgagactttattacattcgaatttacaaaatcaagagccacatttagccccgtccgctacttccccggccaccagcaacgatacaaacctcggtagcgatgatccgtcaacgagaacgtcatccagaggcttaccagtccacagaagattatctgctgttgggctcagtccccgggtccgcctacctactcttcatcccctccatttgcctctaattcgggacttggtctctcgcctatgatccacagcatcttcttcaattggagtggcccgcgaactattgcggcttactccaagttcaggcttttattttgaaaatgcatctacatattctcaggcagttttcagctatggaaacgcttggtacgcctgcgtgaacccttagacgtggaatcgatattgtcaatcagctctcgcgcaaagatatcagaaaggacacatgagttgtcttgttcttctagttttggctctaggaagtgccagtcatagtcgcggtatcttgtttctgtcaccagatcgtgaaccgctgggacttccttattttgccgctgcgtggggcttcctactgtcggtcatgatacgaaatactgtggttgcggtgcagcgtcgtcattacctagtgtggctcctggaagcttggatcttactatccagcgtgagtatgaaattgtagttgttgtttggcagtccgaatcggatcccgactcggtggagagagctgagtgtgaaggtatactggaatgccttgttatttgaggacgaccttcttgcagaattagatctcgcccattcgggctttttcgactttggagaactcatggatttgcggggagttttcgaaagaagagaggatgatggagagggggaaggcgtggatcataacgagggcgaagaacgccaaatagccaggaattatcagggttcatcacgcccggtagactcttggctggctctcaagcgtgatggactctggtacttcctggaagagattgggctacaaaggctcctcaatcgcgtcagtcatatcatttatcggaaagacagtgcctacactctcgcctcattaggtccgattgtatccgagctcgactttcagctatctcgatggtatgaccgtcttcccgggcccgttcaattccctttggccctaaatcctctttccaattcggttcaaacggtgctggggcttcgctacaatgcatgccataccattatatattttccatatatcttagctgtgtttgagaatgaacaggctggagtgggtgttgccggtgatgtttggatgctatactccgtcaactagagccatataaccagccatcgagaaggccaccttccggtgccctgtcaatggtatcacagacgttactgataatgggtgccacgatttctcctaccttctctatcctgcaaccccctcccccccgtttcacagatagatgcgatcatggcaggcgtggtaaacgaaatacagaagtatgcacacctaaagatgccagccgagattatccgagatggaaagaaatgacgacaaatttgtcttcgatcggccaatatgtgcttctgaactgctgatgactgatggctgaaagatttactgctcaagaatgatagtgatctttgtatatatgaacgcgaacacagtatgatgcttgtaagtactgaaggattgtagtaaagtgtgatatgcattagagtaagtcgttagggctcgcaccgaggcaagaccaccaaaataaacagtttatatggacaagaaacaaacagcgttaaatacaatcccttctcatgacaattatgttcttaaatcatcaaatataaaatcatggtatctcaaaagacatggggagatcgaatatggacatcagaaatatcaaaaagaacgcagaaaaactccaggtttccagtggctcggaagagggaagagaggggnnnnnnnnnnnnnnnnnnnnnnnnnnnnnnnnnnnnnnnnnnnnnnnnnnnnnnnnnnnnnnnnnnnnnnnnnnnnnnnnnnnnnnnnnnnnnnnnnnnnnnnnnnnnnnnnnnnnnnnnnnnnnnnnnnnnnnnnnnnnnnnnnnnnnnnnnnnnnnnnnnnnnnnnnnnnnnnnnnnnnnnnnnnnnnnnnnnnnnnnnnnnnnnnnnnnnnnnnnnnnnnnnnnnnnnnnnnnnnnnnnnnnnnnnnnnnnnnnnnnnnnnnnnnnnnnnnnnnnnnnnnnnnnnnnnnnnnnnnnnnnnnnnnnnnnnnnnnnnnnnnnnnnnnnnnnnnnnnnnnnnnnnnnnnnnnnnnnnnnnnnnnnnnnnnnnnnnnnngggggggggggggggggggggggggggggggggggggggggggggggggggggtattatcgtatagcttcacatatatcctaaaccaacacccactcgctacctcgcttgatgaacttgtcgagcatcaagcccacatcagccagtgcgaaccgacaaatataaaagccaaagaattctgcagcgtgtcgtgtgcagagttccaggccaacatgggttttggacgaatgtttgagtccagggtcctcaacttgctgagcaatttgttctggtaatgaattagaatgatgtcaaaacatatagacgagaaaggtattacctagcacttgtgcagcatcgaaaagccgcgccaacgcgcccatgtagttcgcgttggggccagaaaattcaagctgggtgacatttcgcttcgcaggtgttccatgtacagatgtcattgggacagaattgaggactagattgtccttgctactttctcgagcactcgggaccggggtggttgtcccaagcccggaagtttttgcgcgtaatcttttccatgtcaaataggacttattcggcgcaacttccggtgggacgggttcgtccggtgtggaagcgggcttgaacaatggcattgatgcttgaataccaacatcactgcccaatttcttagtcaaggtaacctgaacttggtcaagtatagtatcaaacgactgcatctcctccaaaaccgcatctgcatcatatgtatcgacctgggccaatttgagcagggcggcggtcagaagatcgcagttggacactttctcttcgagggcctttaatttaacattcttcacgcgccagacatctcgaggaataaagagcttctctgacagatatccaccgtgaggatgtgcgagtgtctggtagagacacctcattagccaaaatggacggagaaggaaacactccggacatggctctagaggaagcggggcattggctaccaacgaatttggacgaccaagagctgtgggtgagtgaatgttactaccaaatagatttaatccgccacttggcagtccattttggttgaagttgaagttagctagggtcggtgtgggtaaaacagggacgccgctagtggcgcccctttgggtgtcggggaatgcaccgctccacggggagcttggggattccgggcacatatcagggatctgaatcggaacagaggcattccgagctcggaaaggctttgtattggagtggagtttattcaatccatctggagccgagggtactttgcccatgggccgtgctgacagcggcaggggtggcagttcgttctcaccatcttcatgagtacgagatttggagaggttgacgtggtccgtgaaagaacccaccgacggattgcgttgtgttggatgcaaagtggaacgggccccaggagcagaaagttcgtctttcggcaacggtagcgggcgatttgccagtggggttgcaacattttcaaaagccgatgatgcattggaattcgcgcgagaggagcgggtattgatttcgattttaagctcgcgagtctgactggatagtctccgggctcgcactcctggacctgtagaagaggcgagtgagccgatagaaccctcacggtttgataccgaggtccgctttgagggagctggaaagtcggatgatgctggcaggggcggcaaagccgaagaaggaggagaagagggcatggtatatggttcgggccttaggtcgcctagcggcaagacatcgtcttctgccagcgtagacagcacattcccagtgcttgcggagctttcccatgtcctcccagacatgttgctagaatccgattctcgaggaagtgccgacttggactgaatgccaaactcaaagtcatccatcacgtagcccttggtcatctcttctagcaaccgctcctcttcctctgcttcatcgtccagatattccgaagtacgggaaatggggtcatcccacaaagtcgtctgttcctggatgcggcgcatttcacgatcacgattcattgcctctgcttcctgttctgcctcgcgcactctttgcttcgctaattgaatgttcctgcgagcatttgacacaatatcatcacgttcctcttctctatgctctagcaccggctccagaccttcatcatatgcagcttccacggccgcatcgagtgccgcatcaaactcagcttcggtgtcattactgagtcgacggcttgtccggcgacgaaggtacaccgatgacgccttagaattcgccgatgagggtgacgaaccgcccgattcatcaattgtgtccaaccatgaagtggattcattgatgtcctcctgactacccgtcggcaatgtgatagatcggtgttgatcttccaaggcagacggcttcaaggattgtcgccgagggggaatcgcttccatagaaaatccttttgcctcttccagtgggatctgatggagcctaaagctggaacgaggcgagttctgctggctctccatatggaatccgtcatttgtcgaacgaagcaattccccatatgactcttggctgaggggccgatctggaagagctttatcgtcgtcttccgggagaggaaagtccatacgatgaagttctgtgacccggagcatatatgtgtctcggatttcttgaagtttgagtttctcttcgtctcctccattgctacggaccatgacaagctgcagcaagttgcacgcgtcggtgtaagcttccattgcaccctcaaaattagcagcgttgtcaagaagaacggccgtatttgctttctgaagtgcctttgacagcatcaccttttgggtctgtccatgttgtatggccacggcgtccccgtccccgtcatttaaagaaatagatcctccactagatcgagaagttggcatatctggtttagtgctatgtgttgagggctgaaaaagatggcttgaggccgcaaatgagagatcgagttgttgtgatgtcgggtcatggttgaatatggcagacttctccatctccggcaaatcgaacatcggcaacccattcagtgctggcgcacgttgcgggctgtcgctctcccgtccacggttataacctgacatggacattttcgagctccctcgacgatgatgaccgatgtactccgagggacttttgctagatgctgttgactgggaccaacgatttaagctgcctagcccttctttgatagggctggtggctccgaaaccctccggggacatgtttgccacattctctgtaagtacaccgaggccagtgggtgtgaccgcacctggcggctttaccattcgagtccgagaactagatcgtgacgagcgagaggaaggccggttatgggacggtccagacagcggttccgatggaaagggacccgaaggacgtctgaggtaggatggattggggtcatcatcgactgctgtgtggtgaatcattttcgcaagacggtggaatagcggtcgaagtttatcgaatgatttagatgtcggaaatgggatatatcaagtctctctgaaattgtgtagccccgaggcactacgcgcgaccagacaagcacaatatgagagagaaatgggtatatgcaaccgggccctgtgtgtcttcgctcattcttcgcaagtttaaagtgttgatgtggtcgtgtctcgtagagtatgtatccttgcttttgaaaaccccctctccgtctcaatacatagcttcgtaattggaagggctcgaggagtttaaagcagtaggctgaaagacattatttcaattgacctggaacggatcaggaaccatgcgcattgaagatcaggaaccaaactcacaaatcggggaattttcttgcgtcaatcacactcgcaaaatgcgcctcagagcaacaagaatctgtcaaatccgcagaagggcagactaacagttgccacttgtgggggttcgtcaagttcgtcagggaaggggggggggcttgaactacttcagggggggggttcccgggtgccgggcggtggacgaatgagaaaaagcgatgcggggacctcggaaggatacgatgagttctgggagattagaagaagaaatagagaggaataatggatattgaattctggagtctggagtctggactcccaagggagagggaaaaaaggggacacttctccctagcgcaggctatatacatacagggataagctaggttattgtgcataatacagagtagaactaagaaaatatttcaaagttgaaagttggaacgactcgataggtagaaagctaacagacatctaaatacataaatatctaagacaagtgtaaacgcaaatataacccaaatcacgaagttgacgcttagcgacgggaaatggggggaaatggggaaatgagacagatgagaggggagaatttcctccctccaaaaaaacctcatgaatcccaccttgggtcgttctttgactcggaacttgaatcctttccatttagtccgttctataaaagtacaattcacctcaattcgaactatggctactatcaatcctccgcgggatccgaataccgtgagcaactacaacaattggcgttccacccatattacggccaatttcgatattctgttcgatcagaagaagctggtgggaaatgtcgtctatcaattcaagtcaatcaccgatggcgagtcccaggagatcatcctggataccagccatctcgacattggcgcggtgaaggtggatggccagctatccaagtgggagtttcttccccggctagagccctatggtgtgccattgaagattcgccttgatacgcccgtcaagttaaatggtaccgttgaggttgatgtatgtttcataatcattatcctcatgaatctctatctcattcaaatcatagatcgaggtgaaaaccaccgacaagtgcaccgcgttgcagtggctgacacctgcgcaaacttcaaacaagaaacatccatacatgtgtatgtgacaatcttgaactcttcttggagctccattagctgacaaacttgcctagtctcccaatgccaggcaattcacgcgcggtctatcttcccttgtcaggacactccggatgtcaaagccacctttgacttcaacatcacctccccgctcccggtcatcaccagcggcctgccgattcgcaaggagtcaatggagtcaaaggcggaccgccaattgtatcgattcaaccagtcggtgccaatccccagctacctctttgctatcgctagtgggtaaggattcttccaccattctcagaggtacggttcattaatgcagaactccacagtgatgttgtcgaggctccaattgggcctcggagtgtcgttgcaaccagccctgacaagctggaagagtgcaaatgggaactcgaggctgataccgagaacttcatcaaaacaatcgaggtacacagccgatattctattcatatcaatgttcaattctgacattgcacagaaaatcgtctacccttatgcctggggtgaatacaacgttttgatcctgccgcccagtttcccatatggcggcatggagaacccgatcttcactttcgcaaccccgagtatcatctcaaaggtacgtagtatcctctacgcaatagttagatggaccatgattaatagctccctcaggaccgtgagaacatcgatgtcattgcacacgaattggctcacagctggagtggtaacctggttactaatgcctcatgggagcacttttggttgaatgaaggctggacggtttaccttgagagaaggattctggctgcccttcatggcgaagcctaccgccacttttcggccatcattgggtggaagtctctgactgacgctgtcgagcattttggtgacgatcatgagttcacgaagctcatcgttgatctgaagggcaaagatcccgacgacgcattctcaagtgttccctatgagaaggggttcaacttcttatttcaccttgagaatattgttggcaagtcaaaatttgacaagtttattccccacgtacgcaatctctcttctctcgttctgtttcttttattaaccctttcttttgcagtatttcacaacctttaagtgcaaatcactcgactcttatgagttcaaggcactgattctggacttcttcaagtcagatgccgaggcttccaaggtcttgaacgaattggattgggacaagtggttctatgcgccaggtttaccacccaagccaagctttgacacatcgatggtggatgttgtttacgaactttccaagaaatggcagtcccttcccgactcttccttcaagcctcatattagcgatatccagggcttgaccgcaaaccaattggtcgtcttcttagagcagattctcttgctagagagaccactcagccctgaagtctcgaagttgatgggtgatgtctacggtttgaccgagagcagtaatattgaagtttcgcacctctactgccaagttggcatgaaagcaggagacgacagtgttattgagccgacaaccgacttgctgggccgcgttggacggatgaagtttgtgcgacctttgtaagatgtccccgtgttaatcgcagattctgttcttgatactgacttagcattttttcttgttctttaggtaccgcaatctccagaagatcaatcgccctgtcgccctcgcaacattcgagaagaacaaggatttttatcatcctatatgccgagggatggtggagaaggatctgtttggcaagaaagacaactaggtctttttctctatgtcgtgttttactcgaataggtagacatgaatgctcatcggtttgtgtgccgtggtctttggatagtaaaaattgttatacaacaagactagggcaattaaatattgtacatgtctttgtaatcaaatgatataagatagcagaacggataccacaaatgcaaactactcacttctgcgaggatattccatcatttgtttgcttgaacgagtttcttgtccgtctccgagtacgcaaagatgccggtgttcttttggtcacgcccaagagagaaaacaatatccacctcgtccttcttggacagctctgacaagactcggcgcatgtaggccaccacctgcgcaaccttggcccagtcaatttcttctttcccatccggtccggtctgacttcccttccagaggtttctccagacagcagcgcccagcaccgcatcgcctttggccagcccttcatcatatgcagcaatgattccacgccattgaatgaacagatccttcaggtacttgttgcgaatagtgcgactacccagatcatgatatgtgtccatgcggtgttccgcttcatgcgaaaagtgatcgatcaagtggcgggagtaggtagtaacactatcgcgatggggcagggcacgaaggcgaaccgttaagaggtacatgtggaggaaagtcacctgggaccaggtagaaaaggttggcaagaggccgagctctacagcgacgcccgagattagcttattgtcttcaaagcagatcatcgcctaagccagagaccgctcgtatcgtctcacctttataccaccaaccctctccaacaccaagatcttcaccggcttctgttttcgggacctccactcccttttgcgacgcttggggaattttgtaatccgcttggctggaacaggcctcgaatagcttctgtgtcatgccatacgcaacataagtctcggcggcatttccaggtctccgggaaaagttcttggccaagtcggagaccttgccttgcgaatatgatcgagtgatgatcgatttcaatggctgttccgtagacacgcgggaggcggagaccagtgttatcgggctgcgactagcagatctggaaaggcagaggttctggaacccacgaatctcgcgcgcccatagtgttgatactctcttggataacattgctgaggatgtggaattcgtgaattggtctttcgtgattggtgatctggatctttttctgataaagtatgtttgcattgtttgttccgatatcaagacaggaatttaaccttacagtcatgtttcattagtatttaaaccccagtacatcggaaggcctaggacccacttattttcggccggtaggaaacttcacattcaaaaccccttttaggtatacaggtaactagtaactagtatgccacccttcgtacctgatcacctcttctacacggtgtggcatagttactaacttctacgcgtagcgcgcgcgtactggcggggtgtatactagtaggaataggtaggcggtgtaaaaaagcggttagtggtcgaagtaccggggtttaaatattaatgaaacgccactgtagacctccagggttgcgtatctcctaagagagctagttaggtactgctgaatttgattgtatttttacccttgtatgttctcggtggagctcctgctggttattcaattgatggtttagtgctagtatctaacttgagctcttctcactagttaacgtaattcccaagcgagctgcgcagcccaaaatacatagtaaaagcgataaattacaacatgatatctcagcaatgatggtccttaggaacttgtctttatagcatagtactatatatatgatatatagcatgtctagggagctttaggaaaatttatggctttataactgcgatatatatatttctagcttttgggaacgtaattttcggtaatatttgaaatgacagtaagatagtattctactctccttgagattgatatatagtactacagtaatatgtcttatcaataatcatcgacaaatgggggaataggataaacatatggttgttgagatataaatgtagaatgtgtcgcatttactaaatgttctaagctgcgcagctcgcttggaaattacgttagttagttactaatggttaactatgtaatttatcacttgtattcttgtgccagcggcagagtatgcccaagattgcaatatgcgtaagtatctcggagcccctcggttagtgttgcgtgttttttttgcacccttcgttccgcctttcaggacaagagaggttcacggtctacgggtaggtaggtaggatgcgataggtctagtgacatagtaatagggacatatttattacgaagatagttaaggacgctcttatctctccttatcctattataatctgcatcgtttgtatatgtctcgtgaatttaatcattaaatgtggcagtaggtccgtaacctaactagccaagtctaacaaaagactcatgtgggcgaatatgggatatttcattcccaatgctcatgcgtatggtcgtcatgatccagtggcatgtttcgtttgtgggagacgattagttgctaaatggcgaacatcccatgaccgtgacgtctgtatccaagcccaatggttgactgggccccgcggataaccagaatatgaagtgtagatctctcaatcgcctagcaccaaccgctcggatcgcttttctacaagggggagaatctcagagagccggttgggatctctcaagaaagctggaatatcatctctggttgctgctagcatctgtggacgactgtcagatcaaacacacatccaacgttatccaacggccacacatacctgtcgaactttctcatattcacattcctttgagagatattctcgaataacttcacctgtggcaaagtccacataaactcgagtgtcccggagtcggatcaaaacgtgatcaagcctcatgaagaatcttgtcaatagaagaagtcttcctggcatgactcggatcttgcaagacagcatggtaatcccattgtccgccagctcatcttcataaagaacaacctcgtcaaaaaagaggatgggatctggacgcttcaatagttcaatcggaatgggcttcgtcgttggctcaaacggccgcgcattgggatggagggtgcccttgtagtcggtgctatatgaccagtcgaacggcttcacgacttctttaatcccttcgtgtgttttctctctgcggaacaagccattagtcgcaacgatcgataagcagaaatttagacggctgcaaaaatacctgctcttttgccattctcccgagtacgcgacctggagcatggattgaccagtcttgtccaccaagtccaaggcatcaaacgcattgaaattgatgccccaattaccattctcgtgctctattgcaacataattatcaccaaagatcatttctgggggtgcaatgccgagtttctgggtcatttcctcgatcgggtcggctttgagaataggtagcttctgtgttgaaattcgaaacccgttgatggtgatcgaatttggtttctttgcctccggagagaccgtgacacatgctgtcgtcattgctaaatcttcacaagaagcagcgagagatcaaaaacagctgagccagtttgcagtgctgatggcgataaccccgcggacggagaaagaggcggtccgaccctgcaataatatttgttcggcagaatcttgaaagctttgatttggtcaatgggtctgccattttcaagtctttcataggtagtatcccactgcattcagaatgctgtatttgaataaaaccctgacatggttgtcgtcacctcaagctgcaaaataaagatactcttcgagcatacgattggtacggaaatatgtgtaggcgccgagagcggacaggatggcggtgtgatagccctgtacgtatattacatcagccgggcgttgctggggtgacacgttctgggaatcgcccaaacacccgagcttctgtttctccattttgcgatatcctccatccaccaacgactgacttcgtgcaaagtgatcatgattgctctgaactaagcctaaactcaattttggctacttattatacaaccctctttttcccatctcttattttcacctctcctatccaccctcccaccctctcaccatggcaacgaccaagacgctcgaagctcgctttgagcatctgtccatgaaagacgagaaagagaatggaaatagtgatcgaagctatggcaagcagaaggtacttggctcaacgcaatctggttggagatccaccttgctgatctgatttaccaaggtcccggtttcttcagcccagtcaaacagcaattcaaaccgagctcagctactgaaattggctcttcaaaataataatgaaaacaaggcgaatgccatgaacgttgcagcctcgccaggcaagggatctcacggcgcattggtgacccggagcaccgatgaaaacggcgaccagcgcagatcttcttccctctgcgagcagccaactgtggccaaggagctgcacttgggaatgtttgaaattggtaaaccactaggcaagggcaagtttggacgagtttatcttgctaaagaacgttcctctggcttcgtctgtgcactgaaggtgctacacaagtctgagttacaacagggtggtgtccagaagcaagtcagacgtgaaatcgaaattcagagtaacctgcgtcaccctaatgtcttgaggctctatggtcacttccatgacagcaaacgaatcttcttgatcctcgagtttgctggccgtggtgagctatataagcaccttcgcaaggagcatcggttcccggagtggaaggccgcacaatatattgcacagatggctgcagctttgaaatacctacacaaaaagcacatcatgcaccgcgatattaagcctgagaacatccttgttggcattcacggggaaattaaaatcagtgatttcggctggagtgttcatgcccccaacaaccgacgccaaacgatgtgtggaactctcgactacttgcccccggaaatggttaatcctggctccaaggacaactactacagcgagaaagtggatttgtggagtctgggcgtcttgacttatgagtttttggtcggcgaggctccattcgaggatactcctatcatgacccatcggcgtattggcagggcagatatgtcggttccctccttcgtgagcccagaggcaaaggaccttatcaaaagggttggtatatctttctccattatctatggcccgcatactcacatattatctagcttcttgttcttgatcccgcgaagcgaatcccgctcgaggagatccagcgccatccttggatcctcaagcactgtgtcaaagacgatcgagctgtgaagcggagttctgcttcttccaaggagggcaaagcatgaaacctgactttgacctttacatggtagactttgggggttctagtttctttttgatatttcctcatgtggagttttggtgtctgagcctcatgcattttcaaggcgtgttagattgtcttggagtccagctgaagaggtactctcgatatggcgatattttgatcttaattttattctccgacgtgttcaatacaacatggcacattcaaacaattccacaagaagccacggatacctatgctctctgagatatttgcatctataaccaggacggaggacggagaatactatcggactggatctgtagttgtgttcttagacttcattgacaatcaccatcatagaccaggtatattttgatctcatctcacctttagtgctctcaatcacatgatacatacataaccttacatattttaacaagtaacaaatccgaaaagaaccccggtagatgggcgggaaggtttgtgtcgctagtgaaactcatgaaatatagtacatccagacaatatctatcatacaaagggcgagaatagtacaacgctgcataggctgcgtggtatcatcgatagatctcatcaaatgggcgtgtgtctctgaaacaactatcccaaacttcattgacgacccttgtggcatgggcttcgtctttacaagttgggcgtgctcgcacagagagaatggctctccgtcggacgcattcttggtgctgttgtgtaagcttccactgacctcttcggaaaaattcgcgcgcccatctgcattcgccgctgagcgaactagctcgaatctaaacggatttagcgaatctcggcaatttaagaagggttaagaagacaagaatgacacatacctcggtacaagcggcatgccgaagattatcagaccaattcaccttgaacctgaggtgatcaaaggcatgaaccatctcatgggccatggtatcttcgaggtgtccctggtccttcatttcatttgcgcagatcaggattccatattccggatcgaagccaccacccttccgatcagtgcaacgacgacagtagatgttatgattgtcaagatcgcctcctaattgttgaatgctttcgctgagaaatcgaatcgtagggccttaataaatcgaccatgtcagtatccagctagataactcttagacaagggactcactatattgaagaaggtaatcccgctgatcctcacagcgcttgcagtctgcttcttcattgcgagtgtctcgcgcaacacggaactgctcgattgcttcgttggacatcttgcccgtgagaatcgaatagatattgcggaattgggtccaggtgtcatcaccgggaagaaaccctgtagtttccggctttccattggaaggtgcagccgcacctggcgactgggagtctgtcattttcgatcgtggacttgtggagagtcacccatcactccgcgcgataaatcgagatcctccgcaaatggcggtagtgtacggcagaatcagcaccggaatctggcaaaatgggctcttccgtgattcatcaccgcggggcccacaacacaaccggcctttccaattcttttcgtttgtttcttatttgtttatttgttactgggggttttattggaactggaatttgcgctatggtgacctcatccagcctcacaatcgtgatcaaattgggtgcggggatctatatctgttgtccgatgactcaagtactgaccactcgatatatcaggaacgagttcgattgttgacgagaaaacccacgagcccatactttcgatcttgacattgatcgtcgaaacggtgaccaagctacacagagatggccaccgggttgtccttgtatcatctggtgccgtgggggttggtctgcgaaggatgaatgtagacaaaagaccaacatatcttccacgcatacaagtatgtcttcgattctacaggaatacaagcccatataatatgtctaatggaaaagttgctaatgaaatctgtaggctctcgctgcagttggccaatgtcgattgatgagtctttgggataatctattctcgcatcttcgtgtccctgtggctcagattctgttgacaagaaatgatattgctgatgtatgtacccttatacctgcctagccctgttcctccactgacactcattacagagaacccaatatgtcaatgcgcaaaatacattcggacagttgtttgatatgggagtgattcctattgtcaatgaaaatgataccctggctgtttctgtaagtaagttccccttcgagtcgcgatctcgcatctgacccaatcatttccaggaaatcaaatttggcgacaacgataccctttctgcaattactgcggcaatgatcaaggccgactatctgtttttaatgaccgatgtcgactgtctttattcagccaaccctcgaaccaacccagatgcaaaacccatcgaggtggtgaccaatatatcctctctcgaggctgacgtctcatcagcaggctcctctctcggcactggaggtatgagcacgaagattgtggctgcaaagcttggaaccagtgctggcgtcactacagttatcaccaagagctcaaaaccaggcaacgttcatgatattgtgaaatatctacaatacctcgaggctcggtcaaatggcgtagcagctgacgaccaaagtgaggcacccactgcccctctacatacccgattcatccgttcagataccccgattcaatcacggacattctggctacttcatggactgtacccacatggtacattatacatcgaccacggagcttaccacgcactcttgaataatgccaatcttctcccggctggagtcgtcggggttgaaggccattttggacagcaagaatctgtgcggctagtggttgttgatcggccatccccagatgccttgaatggcgattttatccatcacagagaggaacctaaggaagtcggtcgcgctctggttaactacggaagtattgaaatcacacacattaagggccaccgcagcacacagattgagacgctacttggctatgccgatagcgactgtgtggcaatgcgagagaacatctcgttccaccccgaggaccacaaacataccgtaacaccgtcactaacaccggccttggaggaatggaagtccccggaggcataatgttggcccatccggtacatgcatatcatgaacagaagcgagaatcttcttgcattcaaaggcattgatggtcgatattcccagtcaaacctgatcgtttcaatataaaagttactcgggatatataggccgacaatttgaaagcccccaaagcatgaaatgacctccaaaacagcatgaatgaaagcacttgaaaattgaatgtttatacgtcaattcaagtgccatgtaaagatatgagaaaacaaaaatgtcaagatgcctgaaagcctatcaatcattccaacggtccaaccacttctgcattctcttgtccaatgtgggcgcaggagcgggcgcagcctgaacacaaacggaggattagctttcaaacccaatcgacaacaagcaagaatcaaactcaccgtgttctcgatggtgttcgccgtccatgtcgcaaaagctgtatccgtgtactggatggttggcgcacctaagtagctggttgcaatagagaacgggaaaggcgggtattgaggagtggctgatctggtggcgacagtagtcccagcgctcttaggcatcggggcatatttgatcgagccagtctgttcaccgtatgggacggtatgctggtcaactacagaaacatcgccaacgccgccgacagcagccacttgtcgtttgcgcaattcattgtgctcggcttcgcccttggcggttgaggttgggaactgcaaggtggcttcggttgaggaactcttggcgagactagaggagttgcaaattgaagtgagatctgcggcctcgatgaggtggtcatcgtctttgactgtaggccaggaaataacgacggcgggaatcggctgcatcgtcttgatcgcatttgttactttggtcgagaatgtacctttcatgttggtcaaagtgaaatgagaggtgaacccggaccagtagttatgagggcctgataggactatcttgagaaagctgattgggccccagggacattggtcagtcacaaagcgaattgatgaagccgccgatgtcagaggcaaatgaattgtcttactatgcattgggttcattcccaccgacactttgatcgacacgaaatgacaccatgtcaccaggagcataggcgccattgttgataacttgcgatagagtgtcctagatgtgtggttagctctatgttttgcagttccgtatagagagaaacatacatatgaacctgttgtctcatcaccggcacagagataaaaattataagttgaagttggttcgccatctaagccccaaagcagactcacgacagctgcaccgtcgaaactcagatcatatgttgtgatctgagaactgatctggccatagacggccgtgaataacagggcgacctgaagtaattggactctcatggctgatatgattgagaagcacaagtctcgaaagaacagagagttgtctcccagtcaagagagagggaaatcaccccttcatagggtggtctggtatgtgcatcattcctaaggcccttgagccctcgagggtttgttttctatagacccgtgatgtgcactaagataagtggatgggtccgtgctatcgggcttctcctgtcaaggtgtcagcccacaacttttgacaacttccaaacttataaccgacaggatgtcgtctcaagcaaattggaactcggtgactggcatagctacactattgttcgatggcaaccttgtcgccattgctatcgctgtcctattcacctttggtgtcccgatcgcactgcatatcttcttcttccagaccgtagcttctccgccctcgagtaatttcctactcctaggccccagtggagctggtaaaactgcttttacgaccttggtaggttgcagtctatgacctgagagtggctaagttctcgctaaccaatctatagctcgaggccaagtcctcgcttgcttcaaacaagtcacacagcacccacacctcccaagaatcaaccttagtaaccgtgaccttaccaccgactgtcccaactggatccaaccgctaccgatcagtgaacgatccctccttgaaggaggccgtccggaatccaatcaagtaccgcataagggatacccctggccatggcaagctccgcgtatcgcaaggaatctccgagctccagaccatgtcccggtcaaaggatatcaagacaaggctacgcggtgtggtgttcatggtcgataccgctgctctagttgacgaagtaacgctccgtgataccgcaacctatcttcacgacgttctcctctttctccagaagcgcgcaaagaacggatcatctagcaagcgaaccactgatgtccctgtcttagtcgccgcgaacaagcaggatctattcactgcattgccgccgggcgcagtgagggaaaagctggaagcggagattgatcgcatccgcacgtcgaagactaagggtcttctggatgcaagtgcggatactgggttggaagatgaagaggaagaaattttgggtaatgatgaacaggagactttcagcttcaagcttctggagcacgaggtcggtgtcaaggttgacgtggttggtggtgctgtcaagggtgactcacaagaagagttcggatctggagtgcgccgctgggaggagtgggttggtatgtgcttgtgagcgagatgactttttgctttcttgtcttgatggtccggaatagtaaatatgtggtcctatcatagtttacttgtatatgttatgccagaaaagaaaagttgcactgagaagattctagactacaatgtgctttttccattgatattgctaatctaatcctagtgtctcggtagcttgggcatcaatccaatcctgtatggtcaatgatataatataacggcgtgaagtaaacatagcactcacccacaaatctcgagcaagtttcatatttccagatatcgcgctgggctcacactgcgtggcgataggcataaaataccgaccgcgatgattttgctcctgcacctctcgactagtcgcaagatataagcccgtggcagcaccatcctccagactttgacccagccacgatcctgccgttcttataagccaacccaggaatctcccaaaataaaactcgcacccgagctattgatcagtgacgatattgcccggaaagaacgaattgacatagatctgctggctcgctagatcttgatcctcctgaagtcgccgactgagctctttggcaaagaggatattacccaactttgatcggccataccgccatactccatcgtacaaggcgggccacttgacgcgtgacgatgagaatagaagatccagatcgagcttctggcaccaacaatggaacgatgagctggtcacgacaattcgtacgtcgttgctaggcgtcacgctgttcttcaacagtggtaggagtaatgtggctaggacttggtgtccggcgcagtttgtcgcgaatacacgctcgatattctaagatgaacgcttgttatcattttgaacactgatggcttcatttaagggaggtaggtcaatatgtaatgattcagtcgagatggagagatagagagagaagtcacctgcattgcaaatcagtatatgaatccgatctgtgacttgttttatcttctcaatcgcggccttgacatcctgaatatcgcccagatcacatttgacaaatcattctccagggagaggcctttgcggtgcctccattccccacgagcagtgatatatctgtcttcacttctggcaacgatgattactttctctatctcgtgcaagagaagctgagttgtgatctctgtattctcgttattataccctacaggatattcaactggctagaggtcaaggaatctgcttaccttttccaatgcccgcttggccaccctggggaacttggttgctgggctgagatataacgagaggactcactgtcactacagccacccgtccatttaacggcgttatgtcttccagggagaagttccgataagtaaatattactgtcatctttggggggtggaatcgacaaagtcgagaggatccccagatgaagtcgcacatacatctctgatctgaaccgacgtcatcgccacctaaaccgaacagacttgaaaaagaaccatgtgtatattctctatggcgtgcattaagtattgatcacattaaacgccagtctctgcgctgcacggtctaggtatttcaatcccacaatgtgttgaatcccattggggagccttcatgccaacgcaacagaaacgcctgttcccagatatcaatgttcaggaatgttgaacccctacccaacaagcaatgtctcatgcgaatgcatttcagaaaataaacaaaggaaacattttaggccttgtccgtcttggactggtgcagcatccaagtgagcaggtcgaccttggtaacgatggccaatggcttcatcgcaccactttcgtccttctcggtcacaactgcagcgctattccactcgaagaagcggttcaggacgctgagaggggtatccatggtgatctcgatgaagccacgactccgggtctgaggcttgaaggagtctagggccttggagaaatcacggggatcggtgactacctcggaaatttttgagaagtcaaacatgacctcagagacggggctctggcctgaggcccggccgtgcgtcagtcggctgagaacgttgcccagcgtgaccagaccgacgagcttacgtccggagggggcaaggactggaagctgatcaaagcctcggtcgcgcatgacctcgatggcagtctcgcaaggggagttggctgtcacggtggtgatgggcttcaagcgcaaggagctgaccttggcattggccagagggtcagacacaggcacatgagtttgagttgtcgatgcaacggcgggaagcgacgggagtagatcgttggcggcgagccagtcgtcatcggcgaacttgaatcggttagcttgaatggaagatcaatcaggaaaaaaattgttccgaccttggagaggtaacttctgatgctgtcgggaagaatcacaacgatgacatcgtccttggagaactttttggcctcgttagccttgaccagagccgcaattgcactaccactgctaccgccgaccagcagaccctcctcggcgatcagacgccgggagtacttgaaagactccttatcttcagtcttgatccaatgggtaacggcattttggtccagaacctcggggatgaaatcgtatccaataccctcaaccttgtaaggttcattggcacgagcttcgttgagggagggaggcagagcgagaatagaaccatatggatcggcggcgatcacgtcaatatcggggttgtgcttccgcaggccacgagcaagaccggtgattgtaccaccggttccagcaccagcgacaatagcattgattttaccattggtctgggtccagatttcctcggcagtgccaagctcgtgtgccaaggggttgttcgggttctcgtactgatccaagatgtgggcgttgggcaattccttctcgaggcgtctagcgacgccgatatgcgattcgggcgagtcaaaggcggcttcgttgggggttcggatgatagtcgcattcaaggcacgcaggacagcgactttctcggcggacatcttctctgggagagtgatgatggtcttgtagcctgagtagagaaagaatggacacaattaagacggatctgacaagtaaagcttatacaataaatacatacccttgacggcagcaaccagtgccagaccaataccactaatgaatctcaattagcgtccgcgcccatgaccgctcgaagcgaaagagaaggaaggaaaagacctacgtgttgccactggtgggttcaatgagagtatcaccaggcttgatgcgaccagttcgctcagcctcttcaatcatacgtagggcaattcgatccttaacactgccgccggcattgaagtactccaacttggcgtagacagtagcatcgattcccagggtgcggggcagatggttcagccgtacaaggggtgtgttgccgatctgctgggtgatagtgtccaaagtgaccggcggggcgccgggggtagtggtagaagccatgatgtatgagttgtgatagagagaatgtagcaaagaagaagttcacaagtcgaagatttcgccatcgacttttgtgccccgcccgatggtagccggctttctctatgtgggcccatatatctatggactttgtttacttttgatattgagtgttataaggtcataggttataggtttataggttggtgtgtgttatatataggtattagctgatgggttgatctatttaccaatagctcatataatgaatgtcaatggtatacattaaaaagtccagaggattatttctataaaacccctaagcctaacatgaaaaggatcagactataattcagactacatactagatatgtattaacattataacgttagatcaagagtgcagttgaggcgagaatttctattgaaaaaaacatatatactgtactccgtaattgaaaaagacgttgagaagaccaaacacatgacgaggccgaatttgtcagtctactcctcgacttcgggagttcaccagctttctctctttgacaacctccaaaacagagatccactggtctcactaactctcgctaaaaacctattacttctgctaactcctgcttggccaaccttaagagctagggcgatctctacccaccaccaatggttgattggctaataatcacctaaagggtcatgttgatagatcaagctcgacaagctcctacagcacgcatatcattgcccgattccataccaactgtccatacttgactagatcattcgcgcttaaatacgacgcttttacaaagccaaggccgtggctgtgcagaaaaatggccattccccacacactcaaatgacaattcatcccctgagagacaaaaggactgaatgcgaatattatacagaacgccaataatctggacaagagagcgagtatgtccaggaagccgagtatattatggtagtacaactgagttcgtcgtcaattcattttatctactcttcttctctagtcaaatcgcgacacgggatacggcgatcttcacgggaaaggcatcatggaacacatcgtggctgcgccaagacctcctggctatccatattgaaagactcgagggctgattggctctgtcaagtgccagcgcatccgactgttgtttttatttgcctcctttatactccgaactccatattgtattgcggcccaggcgctgtatagtctttgcagtccccagcccatcttgcatttttgttttcttctttttgtctatttcagcgtggtttcttctagaatttaccgagtttggtccatctcttatttgattttgtctcacggtctgatattttgcgtgtgcttcatccaattccccccgagctctccgatctctccaatctatacggagttgttgttggttaaaaatgggctcaatcaggtcgacacattcacaaaacgccgatccccgtctccgtgggaacagtgaacagccgaagacggtccaggagaagggctcccagaactcgatattgcccaccaactctaccacttccaagcgagcatgggccttatttcgcgtggacacagctggagagagtggtcgaagcggcattcaaccatggcatctcctcaaggtatgctttaggagtgtctgtacgctctcgatggtcgtgaatatcctctggccatttgtccccgccgcaattgtcattcatttcgcgcgacccgatcttcacgtctggatcttcagtctcaattatatcgccatggtgccctcggcaaacctgctcggctttgctggcggggagctagctaaaaagttaccaaagatgataggcatcattgtggaaacaactttgggcgctgtggtggaactcgtgctatttatggttttgttgtataaccatggccggaccgaaaactcggatctgattcctgtcatccaggccgctattcttggttcaatcatggcaaatctcctgctttgcttgggcatgtgtttctttgtcggcggtatcaagcgtcatgagcagaccttccacgaagccattagtgaagtcggtactgggttgctccttgtcgccggtttcggtctgttgattccgagtgcgttctactccacgttgcgtggaagcgtcaatgcacagtttactctggtgcagttgaacgaatatgccttgacgattagccgtgccactgcggtgatccttctcgtagcgtttttgacgtgagtggcctaggctcttgcctataatttaaccactaaactctgggatagatatctttttttcaacctacacagtcacaactccattttcgatgatatcctagagaaagacgaacaccgcgacgaagaccgacacgaagaagccgcgagggcaaagcttacaatgatagaatgcttccttgtcatcgccgttgcactgacctgcgtctgcatgtccgctgtcttcctagtccaagaaatcgagtacatcgtggagcgcggcgtctcagataatttcctcggtttaattcttgtccctctggtggaaaaggccgctgagcatcttacagccatcgatgaagcctgggacaaccagatcaactttgcactcttccactgcctggctccttcgatccaaacagcactgctgaacgcaccgcttactgtcattgttggttggggtatgggcaagaatatgagcttgaacttcgagatcttcatggttgtccttctcgtgctttcgattctggtcgttgggaatttcttgcgtgatggcaagtccaattaccttgaaggtgctctttgtgtgctggtttacttcatcgtcgctgtttgcacttggtactatcccccggtgcacataacctcgaccaaccagtcttgaatgtcgggtagtttctaagcgtttttggtccgcggatattttgcatactgtatatcactcgtggttggtgtttttgaagagtttgatagagggggggggggactaaagctccattagatggtcagagtaaataatgtctgaacatcagacagcacctaactagtcagataaggccacataatgttatatgacctcatatgagacaaaaacagtatgatctgaccggtcattattccagggttgtctgaggacgcaaggcttcgttcatcaacatctgcgcatcaacacgcagctcaaagtcggccaggaaacaaaagctgatctcgagtttcgacaattcctgcgcactgactccaccgaccttcgcaacccggctatgcggatagctcaagtcctctagagcctttgaagcaaccgaaacaccagcaagcacaagcctgtgcatattcttgggcaggacccttaatacattatcgaccagcgtcatcttggatatatatacgctagctgcgagatagaccgcagtagacataggacagtacctatgcaaacgaagcagatactcgttcaacggaatcggtggcaccttctttgacaggaacttcttcgccaagatagccatctgaatcgcttcttccgtcgccttggcggggtcgacaggatcatctgaatccttaacatgcaatccgacgattttcaccttgagctcatcctcaacaggggtatcagaaactagagtcgcggaaccatgcgtatgcagctcatcggggctgatgggtttctgagcaaagtaagcgcctagccgctcaacattcaaacaaagcaagtgtaatgcagcctcgggcgaaatatcaaacacggcggcgggggtctgtgacgaatcaggatcgtcggcaggttggtgacggtcaatattatccaacggcgagccgagttttagcatggttggcgcggggtttgcgttttgcttggaatctgtgtcttgggacacggacatggttgtggtttgcgttacggcggtggccatggtgtgcgcgtatggattgctgtcactgccacgcgcaggcgcgggcttgatagggggttgcgagtagcgcgcacctggaccttgaggtggatggtagctctctggctgggtatctcattttccaatgagtggtttctggcctctgtagggacttgggttcacttcctggcgaatcccagaatcgatcacgggggagtcgggagagttgatgtgatatgatcgatgatgttccctttttgtagagttgtatagcggggtgagagtggtaagttgtttggatctctatgcggaatgagaagttgaccaccaatttccaatctaaatgttcagctcaccttgaaacctgatacatatatctgtgaataaaaaccgaatcaagtatcgagttaaattgaattgagttgaattaaaatcaaaacaaatgaacttaagtcgagaaataaggagaacaaggcaaaaggggaggataagaaagtcgccacatgtgaccttcaccttggaatccatggactatacaaaacaaaggtacaacttgagaatcatcacatttcccaaccaggagaataaaacgaaaacaaaccccctatctatatatttaactagactccatacaaaaaaaaaaggctcagcaactcccgatacctgtctcttctttttttccagcagactatgagcctcctactcccgacacaagacgcgatcacatatcctagcagactcttgagtcttatgccgggattagggggtaaaaaataaacaaggtcaaatccggattaaacccatacttctgtttgaaaatggaaggaaagacagcctcagcaagggaagcagtttatccacgaatatctgcgaatgtctcgacatgctgggtcacaaatgcgagacataacgcggccagggcaaccgaatgctcggttttagaacaagacgcatggcgctcgtctgcgttgtccaaggacacgtcgacccgaacccgacatttcctgcaatccacgcttaacgggacccggttcgtctgtttcgtaccggctactagcagggtttgagtcccaggtattctgggaccgtgggccccacaagggaccctgtgccggagacctgtattcatattcgtggcctcgtgaggaactccgtgaagacgatctcggttcatactcgtaaccagagtcatcgaaccgaacgtttttttgtgttctgttgtaccgaggctgccgcgtcgacagccgcacatttgaatcatatctccttctagcaaaattagaggccatttcatagtccgggggatcaaccacaaagagcctgggataagctggcggtgcataccgagaactgaagttgccaacaggctctgatctgtaagttggataggaaggccggtacttcatatctatcgagtgtaggtatgtgcgctgccgtgttaactatcttgaattagcttcttgttctcgatactcggtggaacccaatgatataactcgagggcagtggagtgctaataaatgattcatgaacaatgcatctggagacaaagacatccttgagcaagggagttgttgaaggaacatggcagagaaatgaatggagatcgacgaacctcgttgattacagcagcacgcgcgaattgccgggcacagtatgcgtaagaggacatgtgaacaatggcaaagcagattcctttcaaagagtaaagatagagaagtattgatatatttggatcgagacaaagaagactggacaaagcaagatcgtttgatatggattaaaaacaaagatctttatggcgagatattgtgttgattttatattaaagcattttgacaatgaacagggatttgaaggcaacatctgctcgaagagaggggacctataatgaagttattaaatgttgatattttctgtctccaaataaagaatgactgatacaaacctgaggtcaccagggcgcaggtcaacgagtcagcggctttgaaggccagttgcccggtgacaagattcgttgaaattcgacaaattccctccaacctcttccatcacaccagaaatgtggattttgggagtttcatctccgaaaagaggtcctatatcaagaagtgatatagtgtgattagcagggtgttccaaagtgaggcccaacttgaggagcggcaagatacaacggaacgcctgttattgtccatatcataaccaacaccgactattcggggaatagtgtccaatgccttgtacaatggctggcattactgcctagaatattcactgcgcaacattatccaggggttttaaagtcacggggaagggatccttcagccacacgccaccaagcgtcaaatcagaggtcaaatcactttggcgctaaaagaacccaacggcgattaagagccaaccattgacaccttcgacaatgagatcagacaatatttcatgcatgaacgctcagatccataaaaacaatggaaccgtgaagaaaaaaaaaggaacttggcttgggcagtaaagcttcgccacgattcctatgtccacctctcaattaatcgagcttgattgctatcacggtggtggagaacatccaaattgagcttttgagccccattttgaagactcgcgagttctttctcgaggcttgagagcgctgactcctccgaaggatcgcgcagtgatgtttcatagtgagagttggcgtgcaatgagtaacgaagaagctgggatgcattatccaacggtgccaaataagtcagcagaggagcgtccaccgctatattaagaccgtgcagtgtttcggaaatgtgataacgcttctcgtggaggtcaccaacccctccattctcgcgcggatggaggattgattccggtggtacaccaacacgcctcagaagtctttcgagtgacggttgggcaactacaggcgcagtgggcgtgcggggggcaagaaggaagcctggctgtaacgatcggcgtcgcagagactctcgtcgggatgatggctgtgtgacgagttcgctgcctgcttcggattgatataacgcggctagctgttctaatagttccgaggacgactcccggactccgagttggtttgtaagatcttgcttcgacaaagtcatttcgatcaacatgtcgagtgcctagaagtatgaattagttcattgctggtcactgacactgccgaggtagagcctcatacccgttctagtttctcctgcgacaccactcgcagctgatcatgctcgttctggagttcacggaggataggctcatggaactgctgcctggtcgacatttctgccaagatttcgatctccggatacagagactctatttcttcctcgagggcagtgttcgttgcctcatacgttgcgtcggaatttgaaccgcctccgtgaattgtttccagatataatcgatctagacggtagtgtatttcctccgccacgtagcctgagagcatcgcactgagatgatttgtgcgcttgaccgtagatgcatcgtttccacgatacttgatattagacatgagcgtttccagattcgcgagcgccttgtcgtcctgctttaaccgggtagacagagaagcgagtattctcttgctttccgcgcccgacttatccgttgcggtcctgaattcagcctccaactcaccgacaagctcgattgcctacgtagagtcaggatcagcaacacgcgacggttggttgtgacgggcatgcccctaccgccatggtagtattttgtctccccgcttcatgtttcttttgcagccgagtgatatctcggctccgctgcagctccacattgttttccagacctaattgcttgttgagacttgcacattggagcttcaaagcttcggtctgcttttgaattgttgccgttgaggcttcaagggactcgatggcgttgcggagttcgtcttcgaggataggccgtgttgcgccgagatctgggttgctgataataggctgaagagcgccggagtttacaagcttaatatatctgtttccagttagttccgtcttctgactgatggtgcaaataagacgtacaacgcgagctcatcttttgatagcagggtgtctggacggagatgcttggccgcccattgcgcgttcctgtcatcctcaaatgacgactcaatcacctcccgcttggctgggatatctcgatccttgaaaattgatatgagtttgtcggtcaaagtgtcttccattgttggcttgaggagttgtgatgcgaagacctgataaacaaggagctctgagagtggagctccgatttctcttggagtcctttgttgagaccaacactctcctaggtatatctccacaatactcttactgatgcataatttatctttattatgaataacttttctagtaggagctatagaattatattctgtatgaattcagaagtctttagtcgaatcctttaggatataagccgattaaagagataaaatgatggatatagtttgaaggaacctctgttcctttgggactattatatatatctctctctttcagcccttgtttgtccttggataaaagacatttcatttcagcaggcaacaaatcttgaacgctcgagtataaaataggttcatcccacagggttctgaatgtatcgccatcgactcgagctatccaactaaatatttctaaattgaccccttaacactaaaatcagtaagcatctcttgtactaaccaccatcatggatgcaacaactctgcaggccgcgcgagaatttttcgccgactcgcgagatgatttcgtcgtatatatccaggaactttctgccggagatatctcagatcagggcgccgctgcaatccaaaccgagcttcgtcgtatagcccacacactctctggatggatggagcttcgagatgatcccaacggaatgagttgcagctatttttcagagcggtgctgcaacctctcagatattgttgtagaagtcgctgagatggtcactatcaaggacggacagctccctcccacagttatgaagatgttcggtatgctggctatacacttaggacgacttaatctgaacggccatcgcgaagaggacaagtatgcgcggggctttgatcgcatggccaaggatgaagatcgtagatggcagattggatcccagggaccggatgatggtagagctgaacttcttttgggcttgtggactcgtatgaatcggatttcagagcctggtcccaattgtacgttcgagtgcctgcgtgcacatgcgggttctcacattttataggtcgatgagtataacgacgagggtataaagatcggcagagcaacggagaaaagaggccgagactcaaaatgcggctgcctgtggctgagtaatcaggcaaaaaagggagcaatcaaacgtggatgtcaagaacaagacaggaatatattagaactgtttcaatttcatcgagtacagcgtacaaaatactacggagtaggcacagtataagtgtacctgcgacgtgtctctcaattagcgtctccgcaaattcgagtccgcctttttgaccctcaccaatctgtttaccattaccattcattcaccactcaccacttaccgttacctttgaccatctctacaacttccgagctgcgcttcttgaaaacttccccactcagtggatgcgccggcgacggaaccgcgatgttcctttagactaccgccgtctcaaaacaatccagtcctcgaatcgagtccctttccagcccccgggtggcattcgatacatattcaacagtagacaacccgaaaatgtctgccaagccctctttagaatcccttggccccagccatggccagacctccggttccactttcgcctcgaatggcaacgggacagctattcctccaaacgacgtggagatgaagagcttgcgccctgatccccctaagggctcaattcctctgggggaggatatcatgcagttggctcggatgggggaagttggcactatgcagaaactgttcacagccaaaaagttcaccgcaaactaccgtgatgaggaaggaattacaccgctgcatgtttgttacaatctagcgcaacaaacaatagggatctgtttactgaccgcattctctctttctagtgggcggcaatcaacaatcaatatgcgatgtgtaaattcctgatcgactccggagccgacgtcaacgccaaaggaggagagtcggtggcaacaccagccatgtgggccgcccaacggtgtcattattatattgtgaacttattgctccagaatggaggggatcctctcctgacggacgtccaaggatataacatcctacacctcgcgaccatcgacggcaacgcgttcctagtcgtgctgcttttacaccaggagatccccgtggacgttgttgaccaacaagggcatactggactgatgtgggctgcatataaggggtatcctgcatgtgtagacttgttcctgcgatggggcgcaaacgcaaacgccgtggacgaaggtggcttgacgccgctccattgggcgctggttaagggctcgatgccttgtgtcctgaagttgctcgaatacggcaccgaccgctttgcaaagacccgcgatggaaaatcacctgcgactgtggcgcaggaaatgaacaccctgcgggtttggtaccactcgctcaacgagcgcggctttgaacccgatggcacccaaaaagtggtgccactgggcctttccagcttcgtacgcagcaagagcatcatggccaagttcttcttcctttggccttttttgatgatcctgattaccatttggatgctcagtagcctggcgattttcatcgctgtgcccctcgtgttagttactgtcttcgggatgcagtatgttgcacagcaatttgcgaacaaggggcccatggaataccgcgttcttcaaaaaacaccgtatctagctggtgtctttgctggcacattgttctgggttggcttccgctatgtcttcaaggtgctgccggcaacatactcatcgtcgccgattctgaacatcttgttcgcagtcttcttctgcttgactgcttatttctacgtttttgccatggtcgaggacccgggctatgttccgaaagtgagcagcaggaatcagcagagagaggttgttaaggaactgttcgaccagtggaagttcgacgaagagaatttttgcattccctgtatgacaagaaagccactccggagcaggcactgtcggcgttgtgggcgctgcgttgcgaaacacgatcagtatgtgtctcgataagtttctattgatctgactactaatgcttgaatagccattgcccgtggattgacaactgtgttggatcgaacaatctccgccattttgttctttatatagtctccctcgaagttggtatcattctgtttgtgcagctgactattgcctgtgagtactagtggcgaaagaaaatattggctaggatcagtcatctaacatgatgcagatatcaattccctacctgctcccgtcaatgccacttgcaatgtcatcaacgacacattgtgtgattacgccactcgcgaccccttcaccctgattcttaatgtatggatcaccctccagctggtctgggttacgatgctttgtgccgtccagctcgtccagatctctcgcaaccagacaacctacgaaaacatgcgaggccaccacatcgaccggtcctacccaagcacccaagcctttgcgtcggccatgaccgctggaaccacatcaatggaggccgctggtctttcggcttctggacaaggaccaaacccggctctccgcggttctcccgcacaccgacggaaaaacggctgcatccagcaatggtcatcccttctcggagtcgacgctttttggacaactgcgaaggatggtctccgcgatggaccccaggcaactagaccccgcaaccccttctcccgcggtgtcgtcaccaattgtcgtgacttttggtgtgacccggctccgctcttcggcaagcgccagactggggtggcgatgctcggcggcgaggtgatcaactatcatgatatgtacgaaaccccgatgcgcatgcgcaccggcaaccggtccggcgaggggcctggctaccgcagcgttgctggcgaggaccccgaacgcatggtataagccgatccgagatcttagcgtatttgcatttgttttcgattccagatcctgcattgatatccctctactttgtgttttattatgcaaatcagcgcggtgttgcgttattgggccacgtggcacgagcaaatgtttgcattttgcatttagaaaagatcttgtacaattgacgtcagatattaatgatttgtttcactatactattatgggggatgacttggctcttgagcagcaagacttgactttgactatggggtatacatatatgacacccacttagcatccaaggtcctcaacctccaacccccgcagtttcacatttcgcatcagataagatagatcgtctcggccgtgcagtgaccctgcaggctgcagctaatcaccaacacactgcataagggccgaattccggaccttccctgtgcggttctggaaagatacctagctaggaagggtagtcatattcccgtccgaagggaccgattggttcgtccaactgagtctaggtctaggtctaggtccaggtccaggtctgtacatatgtatatgtattgaaaggattatgctttacattacgcattacgcattacgtgagtataaaagtacctgcatggaagctctagaggtgcatatgccagcgcacactaatcaccaagcaaggaaccttggcagggctgcagcctttcagggacaagcaatgtttgacggccgagggtccagtgtggcctgatcttctcggtgatgcacttgctaataatgtagcggtcaacaaccgcaattggtttcttggcttattacacaaggtactcttactgtgctagggctgtcacctccccaaacttccctagacgcttccggaacaggcaatatatacaatgttattatacggtatagggtccattcaacggctttcaagtatggagcccgaaacaagtccgaatcatagtacgatctgaaacctacctcggtatggagatatggagacgaacgacaggagcagggagagacgtcaaatagtagctgtttcctgtacacatccgatatcgccgaagaaacagccgaaagatctaatctctcgggtaccggcccagtcctatggagacacgagccatgtgcatgggtctttggtagaatacagtcactatgaaaattagacaaatcaggtacatgtatgtcggctagtttcttcaggggacaaggtacgatccacctgtaactatcttttttttttatatattgcacgtcgtacgatgcacatggagagggcttccgaatcaagggaatagacagaataagacagaattataaaattaaaaaataccataacaagtgcgtatgcaggctccatttcgctaagactcgactaggcaggtgatggagcttgaggaagccacttttacttactccatagtgcggaattgcgagctctcatgaattctacatatgttgcccacatgaagagaaggtacggtcaagcctaatctaattaaaaaggagaaaaatgagaagaagaaacctagccatataaaagatcatataaatccaaaaaagaaaagaataagaaaaaagaatacccgccaagtcctcgatcagataaaaattttcaagttatctgatccatgcaggacccacttggatttatctgattcgacgtgatttattcagcttcggagactggggattcgtgttgacccaggaaataaaacaaaacgccagctaaatcgacatgaacctacacaacatcgtgcacaagctatgcatcctattagcaccatctaggattgggatcggcacgagtttcgcgcgacttcctgcatttcgtccaattgtcccgcattcgccaaggaaccattttcttctcaaaagttgtttgtgaccgtaacacttccgatcgggcaactccactttataggtccgcacacatgtttcggtactggttactttacagggatgattctaattgcctgaagatctgggccgatcggttcgtactgtgggtagactcggaaatgtgaagaaaattagaaaacaagctcatcattaacgcaaagaatagaaataagaaaaaaagaatctaaatacacaggatgtctaaatgttttcacccagaatagcgaagggaacttagaacagcgaagggagggggaatcatcgagctgtctcgccggacaaattttaaaatctcggcccacttcccaaaagcaaacccgagacacgtaacgacgatcatgtcacattttgtttcacggctctacagcatagcacgtacccgggtgtcctgcaccacgggagcaccagccaactgatccgcaaagacggagccaacaatctcgccactccgcacagccagcaccgacagcaaagaatcactcagaccgtgggtctgctcgttgcagccctgcagccagataccagcctgggcactgaccttggcactgtcgagtgaaacacggtaatcgcggccggggttccaggccgacgcgccggcgggccgcaagctgcgcacgttctcgaggagttcctcgtgcgcgtcgcggatgtagcccgtcgcaaccatcagcgcatcgacatccaacacctccttgccctcattctcgttcttgaccgacttgacgtggatgcgcatgcggttcgatgcgttgtggtgctcgatccgggcgaccttggtctccgcgaggatacgctgctgccactgtgtctcgtctggattctccacccgttgcaggtacatgtcgttgtagatggactcgatcagctccaagcgaaccacgctgtagttggtggctttttcgatcgcgatgcgcttcttgcgctcttcggcgctcatctcgtagaacttgtctacacgctcggggttgaagatctcgttcacgctggaaaaaagcaaaaaaagcaaaggttagctgggttgtggtactttggggctgtgtatttgggaggaaaacatacaaaggagagtcatcactgggacgcagagcgctatcacgcaggatgagggtggtgcgcgagttgggatagcggcggtgcaaatcgtggtagatctcagcggcactttgaccactgccgacgacggcaatgttgtaaggggccatatcgtcagtcagcatctggggcaggtgagtgcagtacttggaggagtgcatgatgcggggatcctgggggaaaccaggaggcatcttagccttgccaccaagggcaatgacgaccttgcgggagttgcgggaggagatctcgccagtaccggtgttgcgcgagacgacggtaaagaagtcaacaataccacgggcattggtgggaccggggacgacctcgacgacctcctcaccgtagttgacgacgttgtcaaagtgcagggcacaccagcgcatgtagtcctcaaactctacacgggccggcaggaacgtgcctagattggtgaagtggatgagacgcttcttgtggtggaggtagttgaggaaagtgaaggagctgcggggatcgcgcatagtagccagatccttcatgaaggagatctgcatacgcgagcccggaaccagcatacccgagtgccaggcaaactgattctgcttctccaggaagcagaccttgggcttgaagttggggtccttcaaggcaccgagggtagggtccatagcgtcgttcagggcaatggcgacagcgagcgacgccgggccgaatcccacacagagcagatcgtgcatctccccggcgccagttggtcgcaacagcgaccgagctgcctggggctgggtacgtggcaccatatcgaggaaggagagctccttgcgggtgacaggctccatgacgattcaagggtttttagagtaaaaggtaaagataaaaaaaggttaataagtatgtgtatgtatagaccaccggaaagggaaatcccagagcttcaaggatgagcttccaaggtttttgtttttggttcagagcaaagaaaaagaaacgggaaggaaaaaggctttatatggttcggagacgaatgtagcggatcagataacttgaccaagtggatccgcctgaaggttctctgaagccgctgaagcctctgaagcccttcgcctcggggtttttattatttttctctgccaagttttcgtatttccctggttcggggtgtttttttcaattttatcaattttatcaatcagtaaatttcccgttggtctccaccgaggcagagacggcgatgttttatttccattcgggtgtatttttcttgtatgtcttataacccggggctcagatgtatattatacttctagtaccttggattagagactccactccatatgcaggaagatagaagaagaagaagaaaaggttcgatgcttcatgcacgcctaactcggtcaaccagagcgcagccatttataattcctcgaaaaacccaaaaaaggtcttacggccgatgtcgggaataattggacatcggaggcatgtccggaaagcgttattgtacgtattcgcatgtgtatataacatgtgtatgcacgttgttcttcctcttggcaacgcttgggactcgtttgcagtgggggcacatcctggaaaactcctccgggctatagccagtggttagggctttttgctttttattattatttgtttgacgcttgggcagtgggaagtggaggtgacaatgatattatatgaggctattattgctactgccattgtatcatccgtattgatatgtttctatttactgtacctaatacgtcattcataaccggacactttcacagatccacagctgtttcagcggttgaatcagccgagtggtgggggaacgtggtctgatgattatgcgtacatttgaaatttcgaagagagaaggtgctggatgagagagtaatagagtcatacagaagagaagaatagaactaggagacttagtagaatcataggctaatattcttttccgcgcttggctcggtgatcataaccccccccccccccatctcatgtattctcccgtatggatgtgcccctcgatttgctctttttaaaaaaaataaaaacggacgagccccttgcgaaaaattcctgtatgtgggacacttttttttggcgcgcttgcctgcataagatcttctccagccactcacgttgcacctaattagatcgactaagcaactctactacctacttaggtatataccttaccttgaatatatgtatgaatgagaggagagggagagcgagagaaaaaaccaccacccaggccatggaccgattcactcaattccctgccgtcaatgacgatggtgatgatgttcatattgtaccctggcaggtggatgcccaactcccctcggagatacttgctttgtcatgggcagtcttgctacgtgcattcacaacggatgagaatcccgtctttctattgaatggtgcgccagtcaaggcagatctgtctgcccaaacggttcagccagcacatctggctgccgtatcagatctctcagtcaaacacactgccatagtgctgggagatcctccgtccgatgatgatggacatctcccggtgttgcagtggaccctggaccccacgactcagctgggaactttgcgtgcggctggaggcatggatgctactttcctgtaccagttgggcaaccagctgaaggtgatcgtgcaagagcaggctgttctaaagggtataccggtgacagtgtctgccaccgaggttcctgatctagccatttcaaatgcctccccctccacattaccagggccccggcttctacacgagcttgccctgcgtgagctcaacaattcaaaccatgccattgaattcctcaaggcggatggaaacgttcagtgcctgtcgtaccatgacttggaccggctttcctcggagctggcgagtaaaatagctcgtgcttcgacgacctctccgggcctacagaaggttgtgccagtacttttgccccagtctgtggaattgtacatttcatggctggctatcctcaaggctggcgcagctttctgccccttgaacaccgatgcaccaacagatcgcatcgagtttatcctgcaagatgtggccgcatcggtggtggtcacaaatgatgctcttgtaacaaggataccgctgaaagagcatatttctattctcacagtggacgatcttcaaaccaacgccgatatcacagagccatgcgcagaaaacagcacttccactgatctggcgtatgtcatgtacacatctggctctacgggccgccctaaaggcgtcggggtgtcccatcttgctgccacccaatcactccttgctcatgatgatttgataccccctttcaagcgctttttacaatttgcatctcccacctttgatgtttctgtgtttgaggtctttttcccgatgatgcgagggtcaaccctcatcgggtctgagagagagaatatgcttcttgatatttcccatgtgatgacgacgatgagagtcgatgccgctgagttgaccccaacggtggcaggagagttgctgcgcacgcgagccgccgctccgtctctccgagtgctcctcacaattggcgagatgcttaccagacacgtggtagacgagtttggccagtccgagggcaggggtggcattctccatggaatgtacgggcccaccgaagcagcaatccattgtaccgcggccacccatttccaggccaaggatcctgtcaatatgattggaaagcccttcaaaaccgtgtcggcatacatcatgccactcccttccgacgagccatcctccaaggagcttcgtcccctttcactaggccaaattggagagcttgtggtgggtggtcctcaattggcagacgggtatatcaaccgacccgaagaaaatgccaaggcttttatagacagtccggtgtatggccgactctatcgcacgggagacaaagcccgcatactccccactggagagattgagtgttttggccgaatttccagcggccaggtgaagctgcgaggccagcggatagagctaggcgagattgagcatgttatcaccagagcctccggtatccgcagtgctgtaaccatggttatcgacgggaacttagttgcatttgttttggttaccgacaagggaacgacggacaacagtctccgagatgtctgtcgtcggctgttgcctcgctttatgatccccggagaattcctgctcgtcgaccaattcccccaacttccctcgggcaagatcgatcgtaaaacactagaagccaatttcattcgccaccgaagcactgccctggcttttgatgatcaaccctgccgagacgaaaaagaagagtctatcgcctcaagcgtagccgatgtgctaggccgacgactcccgtcgacagagagcctggcagcagcaggtcttgattcgctagcagcaatccgtctcgcgtctcatctcttggatgcaggaattcggctaggtgtggcttccttgttggaggccgactcagtggacggaatctggcaacttgccaccagtcttgaagctatgagcccaaataatgatacgcaagcagccttgcaaaccattcttcagcttgttttagacgcaggtgcagcaagggtcgactcgctgggcttgagcgatcaggtttcggacgtcataccgtgtagccatatccaacaggctatgatcttggagactgttcgagataacaaggcatactgcaactggattgagctggaattcgagccctcggtcagttcaactgcggtaaagaatgcatttggtcaactggtggaccacaaccagatcttacggtccggatttgtggaaatcggcctcaaagatcactcatatggtcgattcacctggaatactgtcaatgaccatatttccctgaaacatgaacttgaatacgatttgggcctgagtgcgggtcacgatgtcttgaacccttttcgagtccagatcaaagaaggcaaggaccatctccgcgtgctggtgcatatccatcatgctctttatgatggatggtcttggcaaattatgttgaaagatctcagaagtatcttgtccggagaggagctcacttccaaaccgccatataacatcgtcgcaaactatttcattgagcacaaactggacaaatcggcaatagagtcctcagtgtactggcgtgaacaactccaaggtctttatcctgcaactttccctattttccacggacatacagatataatacatgctaccgacaaggctactcgcgtgctggacatatccgtatcaaaactcaaccaagtttcccagcatcttcgcgtgagccggcaaaccatttttcaagccgcgttttgctatattctctcttcctacattggaaccggtgatatcacatttggaactgtcttttcaggccgaactctgcccttgaagggcattgaaacggttctcgggccttgtatcagaactttgcctacgcgcatgaacctcgacaaaatgcaggacgtgaccgatcttcttttggccatccagaatatgaaccgcaagtcactcgagcatggcagtctttctcttcaggatatcaagaaggcttctggtatcggcttggatcgcagtctcttcgacacagcgctcgtgtggcaggaaagcatttggtcagatgatgaccagggctcggtgttccgggaagttggagcgggggagtttttagaatttgcgctgttgctggagtttgagccgcgagaagaaaacatctttgctcgggcgacatatcaagagtcggtgctaccagttgagcaagctatgatactactcgagcagattgattctgtggcctcggtcttgattgacaagattaagcttccaatccaggagattcgatcgtatcttccctcgtcaacgctgtcaattgaacatgcaacattacgcgatcaagtcaatttgccaagcctggcatctagcgtcgagatgattgcttctacagacccggaccgggtagcggttgagttgatgctctggaagtcagagaattctacttcgttgatggaaagcatgacctatagtcaactaaactcccgagccaatggctttgcacacttcttgctccatatcggagtgacaaatgacgatctaatagccattcatctgacaacgtctcttgacttttatgttgctgtgcttggagtcgccaaggccggtgctggtctcctcctccttccccaggcttcttcgcagaaaatccattctattctctccacggcgaaatccaagttctgtatcatcgaccacttgacggaaagagatcatagcttggattctctgaagtccgtccagctgattcatctcttttattcactggatgtttaccatgagtttaatattccatataccagtaaagggtctgacgttgcctatgctgaagtgtcgctaattgaagatgacttgattgaaaacatcctcatctcacggcaaaacctgcagagcaatatcaatgctctgtcagactcgtatccagcgccaaccggatcgaaaatgctatcatgtcttcagggatcaggtggtaagttttccatgacattttaattttcagattatctttctgacaagaatacagcatctatttgccaggcattctttgcttggcatgctggcatgacattgtgctcagctacagaattgataatgatgactcgtatcgagcaagcctgtcaagacatgaacataacacacctgcacttgcctcccatgctggcctcccgtattgatccacaagccgtccccagtgtgcaatatctcctctcttctggtgaagaaatgacccttaagctccatcacaattgggccggcaaaggtctgaatcaagcatacagcaaccatgcactgactcacgcatgtactctctgtcttaatatgcaggcatcgacccatgttcgaaacattggtagacccctgaagaacacatctgccatgattgtagcagatggagattcgctcagccttcttccacgcggtgccattggagagctatgcttcggcggggatcaaattgggcgctgtctacctgactccaagtcgccagttactgggcgattcgttgatcatcctgagtttggtctgatctatagaacgggtgactctggaaggctgcttcctgatggtacactcattctttcccgaagctctggccttgctcagtcgtatgctccgtctattgatctagacggagttgatcgtgctctgatgtctttagaaatggcaaaagaaacagtgagcatgattttggatgagccgacactgcgattggcagtgttctgggttccttcaaagaaatgctcaggttccgtgcaaatcgagaaggctacgaatgatcttttcaaggagctcaccaagaaactttcttcttctgaccttccatcccttcttgttctcgttgacacgatagatctcactaggtcttataagattgattacttcaagctgaggcaacggttggggcaactgataacgaaggagcttgcgatattttcaccaaagcctaataccgatactagtgacagtttcactgatcttgagaagactatctctgccgcgctatcggcagtcactggcaccgaccaaacaaacgtccgcaaacacacatctttctacagactgggtctggactctctttctgccatttccttctcgcgaaagctgcaggagtctggatgtggaaggcttgccgtgtccacaatcctgcgccatagctctatttctcaacttgcagctgtcattactgccacgaccaacggggatcagcccgaaaatgcggtgcccgcaccaccaacagtgttcgatgaaatcttcactcatcaaatagaagatgagttcaaagctacagccataaatgttcaaagcatttacccttgcactccactccaggaggctatgcttgcagctgaatctggtgatcattcggcttatttcaatcacctcttgcttcttgtgcataccaatgccgagaccatgagagcagcatgggctaagatgatgcaaagacaaggcattcttagaacttgtttcacgcaaactaatgataggcggttcgcatatgctcaggttgtactggacacatcggtcttaccgtggtcccatattgaaacttcctcttctgagcttgagaatgtcatcaaggaaaacaagtccaagttcgagggtatttctcctgtcaacggccagttgccttactcattgactttgataaccgattcaactgcgcagcagacatatcttctactgtccatccatcatgcactgtatgacggagaaggtatcgcccagttattgcaagagctccagctgttgatttcaagtcaaaagttgccaaagaacactccattccgcaacttcatcgattacatgacctctgttgattatggctcgtcggatgaatactgggaccagtacctgtccggtgtttcaccgaccctccttcccacacccgggcccgcagccaatgcaaatgagtcggcatcacagcagatccatacatccctcaatggctctttcgtatcattcaggcaaaactgcaaagacctctccgtgacccctttgaacatcttccatgctgcatgggccagactcctctctctatacaccggttcatccgacgtctgctttggcaatgtcttcagctgccgaaccgttcccttggatggcgcagatcggatagtcgggccttgtttcaacacactcccaattcgaatcaagtcttcttcaactgcaacaaatagtgacatcatgaaattgtcccaaaagagcaataacgacattttgcctcaccaactcagccctctccggcgtattcaacgacgtattcttggcgatggctctcgccttttcgagacgctcgtcattttccagaacagaaatacagatctcgattccaatatctgggaacttcttcaggacgaaggaaacatgggattccccttgatatgtgagatcatccgcgacgagtctaaagacaaaatacagatctgcctccacttccaagtatcgtatatctcacaagccgtggctgagaaaattgcgcgggactttatagtccttgttggacacatcattcaatatccgtctgctcaggcatccgataagcggctattaggggcagacattcctcgagtatttgaacataacgtgtctaagacgtcaaaatctgttcagttccccacaaaatctcgccaaaagctcccatggtcctatcgagaggagattgttcgcgaccttctttgcaaattttcggatgtcgactcggataatgtgttccaggacacaacgatcttccaacttggcctggatagtatcaacgctgttcaggtatcggcgaagttgcgtgagttagggtataagatctcatctggtgatattctcgaggtatgtcatattcctgggggtgaattctattctctacctactgacttgtatcaggctgcttctattgatcaaatcgcttcccttcttacttccaacgcgaagattgttgaggaaatcgagttcgactttggacttttccaaaccaattatttgcagtctgtttgccagcaacttgagatttcttcgcaaatagtgcagtctctgcgcccttgtacgccagtccaaaacggaatgctggcaatttttacacattcacacggtgaagtgtacttcaatagaatgaccttaaggtcctcagtacctttagataagaaggtcttgaaagaagcatggtctaaggtcatggctcagcatgagatgcttcgaacaggatttgttgaattgcgcgatcagaataatccttttgctatgataacttaccatgaatacggcaaattaccatggtacgagacctcgtcttccatggaagtcacttctggtgttcaacaaaggcacgctttggaaaatctccaccagcctccatggagcattgaagtcgaagtaggtgaccacaccagtatcatgcatttctctgcattgcatgctatttatgatgctcagtctctggccaccatattttcagacgtcagagcagcatatgaaggaaaggctctggctatgccggccccagtcaccaaaactctcggccctatccttcttgagagtaagagccagagcgaatcagcgcaatccttctggaagggacttgccccagaagtgcagccctccaaattccccgacttaaatcccatccgcacaaacgagcgaacattactcaccacctccatccgttgcatacagtctcgcaaggcttttgaagatgcctgtcgagatatcggcgtgacactacaagcagcggggcaagccacgtgggctcgcttgctctctgcgtacacgggcgagtccaacgtcacttttggaaccgtgctttcaggtagaaacttgtccgctgatgctcagcatgcggtattcccgtgtttggtcacagtgccgacgcccctgcatattgagggttccaaccgacagcttttggactgtacgttgaagcgaaatgctttattggtaaagaatcagttcgcgcctctgtcgcatatccagcgttggctaggtagcgatgagccactcttcgacacgctgtttgtctatcagaagtttaattctgatgccgttggtgctgataagtgggacatcattggcgaggagacgaatattgatgtgagtaacaagcagacaggatactccacaaatttacaggatctaggctaacattatatagtatcctgtctctatcgaattgattccgcactggaacgatcttcagatttcgttgagctaccggggcgatcttgtacccatggaacaagcaaagatcctcttgaatcagtatgaaagattattgcaagatactgtcttctgtccagatgtcaattccaccgattacgactctgtgggtagtagtctgctatcaattactcctgccaaagaagcaccaattcctaccacggtttctttgctacatcaattcgtcgagacgaacgcgatcaatattcccgagaagattgcgtttgaatttgctttcggtgacattgcagaaaatctgcagaagaagacatggacttaccgtgagttcaatgaatgtggcaatcaaattgcgcatttcctgcaggccaagggggctattcctggtggaattgtgggaatatgcttcgacaagtgccctgaagcctccatggcgattctgggtattatgaaagctggatgtgcatatctggctattgaccctggtgctcctatctctcgtaagcagttcatgttagaggactcggctaccaagatcctcctttgcaatcaatcgaagatggcggaactagatggtcttccagctattgatgtccaggcacttgatgagcctgggcttcttgaccgggtttcaacaggggatatctcactttcccgtcctatccagccagatgatacttgttattgtctgtacacatccggtacaactggaacaccgaagggctgcgagatcacgcacgataatgccgtgcaagcaatgctggcattccaacgattgttcgcaggacactgggatgaagagtctcggtggttgcaatttgcctccttccattttgacgtcagtgttttggaacagtactggagctggagtgttggaatttgcgtcacttcctgtccacgcgatttgctgtttgaggacctgactggaacgatacaaaagcttcgaattacgcatattgacctgacgcccagtttggcaagactagtccatcccgatgaagttccgtcgctttgtcggggagtcttcatcaccggcggagaggccctgaaacaagaaatcctagatgtctggggcaagcatggtgtcatctacaatggatacggtcctactgaagttactatcggatgcaccatgctcccacggatgtctgccaatgacaaagcctcaaacatcgggcctcaattcgataatgtggggtcatatgtcttcagccccggtacgacgacaccagtcctacgcggcagcataggcgaactctgcgtctcgggacctctcgttggaaagggctatctgaatcgagtggagctcaccaaggaaagattccaagagcttcccgaatctggcgatcgcatctatcgcactggcgatcttgtgagaattttgcacgatggaagcttccagttcctcggtcgcattgatgaccaggtcaagctccgcggacagcgacttgagattggagaaatcaacgaggtcatcaaacaagctacgcctgaattgaacgaagtcgctaccctggtcatcacgcaccccaaacaatcgaaggatcaacttgtctcctttttcacgactgtcactgcagataagaaatctcgtgctgtcgacgttggagtccgatattcagaagaggaccgcgccctgctatcgaagatcaagggtgcttgccgcactcatcttcctgggtacatggtgcctacacatatcatcccgatgacccaatttccgctgtctgccaataacaaggctgatatgaaagtcttgaagagtatctatcaggagctttcgctagaaaacattcagaaattgagctcgatgagcgttagccagtctactgacagtgtccaggaacagaagatcatatctgtcctggcgaggtttattggttcctctgaggagaagatctcatcatggtccagtatctacgagcttggtctggattctatatctgttattgctttctcgagaagtctccgggaggctgggttttctcaggctcagccatcgaccatcatgaagtgtaagtctggcagtctaggtgttggttaagaattacttgactaacgatacatagaccctacaatttccggcatgacgtcggctctacaggtgcctatctcatcttctgtgtccgtggaaaccctccaacgcaatgccaagcaaggcatcgaggctttcgctcacaaaaactcccacgctatcatcgagcatattggagcccgctacggtgacattgaaaagattgcgccctgcaccccgcttcaggagggtatcatataccactacctggctagtagcacgccgttgtactgctcatctttcactttcgagctcgacccttcagtgaacctcgagaatttgcgcgcggcttgggatcaggcccagagagacgttcagatgttgcgcgccagatttctgccatctccagacggctatgcccaagttgtcatgaagaaagacgcccttccttggttccttgctacggccggtaccaatcaagagattgatgacttgcgcaaagaacgacatgaccactggattgcccagctcgacggtctttcatccaatctatgggaagtcggagtcatctcttcccccaagatatcggtaatgtgtttgaacatcttccatgctctctatgatggaaatagcctagtcctgctcctcgaattggttgcccgaagttatctcggtcagatcgagagttcggagttaatcccggaattccttgatgtgttgcacttgggtcccctttgtaaaaaccctgctgcagaggcgttctggaaagttcatcttgctggctgtcgtgatcgagctttcgccgaggacggccaagtagacagcgcgccaattctgcttaaagctcaaatgaatgcgacagatcaagttgaccatcttcgccggtctctcaatgttacagagcaagctgtccttcatgcctgttggcttcttactctccagcaacaatactccttcgtgccaccacttggtatcattgcctcaggcaggacaatcgatgtaccaggcattggcgacgttattggaccgctgttcaatacgatccccagcaatgtccagctgcatggcttggagtcttggtctgatgtcgctcggcgctgccatgactaccaggtgtccatgattcctttccaatacaccgccttgcgggacatcgtgaaatggctcggaaagaaccccgacgagcggctcttcagctccttgtttgtcttccagagggaagatgataacgacgaatcgttcacaaaagatctttggtgtacacttgactcggaggcccagcatgaataccctctggcctttgagattgtacgcaatagcaagcaattttttacagccactattgccgcaaagagtcatgcggtatcgtcggaagatgctcagcagatgttatctaagtttgagcaaattctttttgagtttgcgcaagaccccaaaagagagttgcccaagataaatggggtgtctctcgcacaagttgtggcggatggtgaagtgaagggacaccacgagtctccaagaaccccagaacataccaatggtgaacataccaatttcgaacatattaatggctctttgtttgaatggacttcccaggcttgcataattcgcgacgtgattgaaacccttgcgggggtggagccgcaatccatcaacgagaacacatcaatctttgaagttggacttgatagcatcgatgccatcaaaatctcctcgcggttgagcaaagccggcatcaaacttcctgtgagttccatcatgcgccatcgtacagtcaaggcaatgagcgagcaactctcaatgacaaatggtcataccaaggatgggacattatcatcacttaatcggctagagaaattgttgaccgagttcctcggggctgaaggtcttctccccccgagcgcgattcgagtcttaccagccacacccatccaagaagctatggtcgctgaaatgtgtgcctctgggtacaagcattattacaaccacgagatcctcgagctcgagccagatgtagacattgaaaagatggagcgggcatggagagctgtcgttagagctcaccctatcctccgtacttcatttgttgaagtctgggatccgaagattcctgtttcatacgcccaaatagttcacaacgaggatcaaattgacctcaagactatccatctacacggcgtctccgtggaatccgttataaagactcagcgctcaagggtccacaataagccggcaggctgtcccttgctctctatcaccattgcagtggaaggggataggcggtaccttgttttgtcaatttcgcatgctctctatgatggttggtcaatcaatctgctccacgaagacgttgccaaatcgtatgctggtgtagagtgttctcgcccgccagccgatgaaattctcgggcaaatcattgcctcgtctggcgacgaagccctcagattctggcgagcaacgctatccaaattcaccccggtgtcattctctcctatggaacatgcggagaatagctcggttgtcgttcaccgagcagaacaatcattatccgttccaatgtccaaggcggagatgttctgcaaacgtcatggcattaccctccaggcgcttcttgtcggctgctggtctcttgtccttgctaggcatgtcaagaagctagatgtggtatttgggcttgtcctttccggtcggaatgtggctaactctgagcacgtgatgttcccgactatgaacactgtcgccatgcgagttattcttcatgggacgcgggtagaattggtgaaatatgtgcaggaggctctcctcgccatgtcggagcatcagcatttcccgcttcggcgcgccagaccagatacgggatcgcgggcattgttcgatacgcttttcatgtatcagaagagaccggtcgaaattgtccagaatgagcctaggcaagtcttatataaatctactggcggagcagccgaagttgaataccctgtttgcgctgaagttgaaggtgtcggggaggatctagttggacgagttgcttgtcgtggaaatgttactgggtatcaagatactcttgtgctgttggagcagatgagcgatatcctttcgtctatcatcgatggtccatctgaacagactgtggattttaccagtgagggagtgaagatttgtggaagcgccgctttccaggatgagtctgaacaaaatatcgagcctgaagcagtgcccgggacactcgatcaggcggaatggtcgccgattgagtcaaagatccgcaaaattctttctattgcatccggggtacctgatgattccattgacaagagctccaccatcttcgagcttggcctggacagtatcagcgccatcaaggtggctgcactcctgaagaaacagtccgtcaagcttgcggtcagtgacatgcttcgggctggtactgttgaaaacatggccaaagcagccaacagcggcctaacggaggtctcgctcacaaatatatcaagcattctccacgattcactcgatggcatcgatgtggcgggactgctacagtcacatggtattgatttgcaactagtacgaaaggtgttccccacaactgcagggcaaacctatttcctctcaatgcacattctgaatccagagatattctatcctgagttttactatctgacatcacgacaattgagccctgaagtactcgatcgggcctgggctcgggtcatagaccaaaccccaatgcttcggacggtattcgttcccacttccgactctccgctattaccctatatgcagatcgagtttgaggttgtgcacattccggtgatctggcattccaagtttgatcggcatcttgtttcaagaagccctaagcaagaatttggggtagtgccggtcgcactgcatgcctgtcaaacgaaccagggaacggcgcttattctgcaaatccaccatgcattgtacgacgctgtcagtttaccccatatactgaacagacttgttacgcactgcggccaagaggatgttgtcaaaccaaaccccgaccttgatctcgcacagctcgtggcattccaatatgttcattcgcccgtggatgtccggcggcaattctggcaaaagtatctaggccaaatctcaacggcggtaaaacgagggcattgcttcggctctgtgcaacatcactaccgaccgggcctggtttcaaatatggccagtgtcgaaaaggttgccaagcgccggggccttagcattcagaccgtctttttagccgtctatgcacgagtgcatttgcagcaattcggtgcagctgaaaccacaaatggcgcagggtctcgcaggcggtcaactgttggactgtaccttgccaatcgatctcattccattgagggtttagccgaatctgttattcccaccgttaacattgttccactacgactggatgacaaactcagcgattccaacgacaccctccttgacgccgcccgcagaattcagactgaaatcaacgagatcagccgacccgaatattcgggcgtttctctcctggaaattgccgaatggacgggcatccgaatcgacacctgcgtcaatttcctgcgactccctgagcaagaattgaaagtacccggcaactgtgaccacgcaaagttttcttttacagcaattcaacgcgaggagtttgaagatcttagcggggcagccccggtttcgaaaaatgacccaattccgattaatggcaatggtgtagcgccacctggtgcagccgagacgatcccaggcctcgagcatccaagcgcctcaacggcggctactcaagacatcttccaggtaagtgggggaatgcacatcactttatcctaacgggtaattgagccttatacaattgcttacatttcaacagtctacgatcgacgtggaagccgccatccgtaatggtcggttagactttgggcttttcgcaccagaatctcgtcttgaccgagatacagcggaaactgtgatcggcgctatgcaacgggagatgtcggcattggtgacaggcttcgaatcgatatagaatatctagtgatgctagggatggaagagaggaggggtggaagagtatcccggagcgattccacggcgtatgaagtagagtagaccaagatcgttttttttttcttttttcatgtggatactcttctttttcgttacctttttttttgtgctatttgctcttgctgtctggctcatcatactcgttgcatatgaggcgttgaatgtgtatatgttgcttttcccaatcgaattatcgaactttgatttgacgagtgacggcgggacccacggacgggacgggcccggggatctttttatcttttcgaactgcaggagataacatagatgtttgggtgtagtacatagttagtatagtctcgtatagggtgttataggtacaacatggaccgggttttctttttttggtatacatatatatccctctcgttgacattggaccaagtactagcctttttttcacattcccccaagaataggactgatgaatcagatatggaatataagaggcagtgcgatgcataggtttaagcaagggggatttcgcgtggcctatcgccgacttgaagttgttcttctctttctttttctttttctttaggttagagcaccgactgaaaataacaatatgtatactagcactccgtactccgtaccctgattgaaaataagaaaaagaagagaagcggcatatacccctccctttgtttattgtggcgtcagtgcaggggccgtgcgaatgaaaatcgaagacgcgcagtgttccccaaggacggagtacagcgtacatatgggcttaaatttggatttgggttatcttagagctgagtttgctggcattttcattgggatattattatttttcatgggttataagaagttcttgtctcgatgccatggttttatatagggctatttattgtttattgcttacctaatatttgttgtcacaatcacgcgtcaccctaatccaaatcgggcatccaacgatcaacaacgcgactgcgcgttaatcggtttggtctttatttctataacacacccgaacaccctgaacactttagaatacaaacgtctggatagttgattttcgcaacattctttggtatccccaagtggtttgttaaagcccaactctcgattcccgatcgttggacacaatcacataccaatacccaacccctcctcgattcactttcgcgccctcgtgggctgacctcaccttttgaattgggggaattaccccttgcgaccttcttttttgttggaagaaaaggttccgacacacccttgacactacttttacaagagtgtacttgcaagtgaaacattccacacgccttgatctggttatcctcgggtatcaaaaggcatcaaggtgaaacatcgcaggcacgcaggcacgcagacacacgcgttcgtgcttgtccctaggagagaagtcgaattcctttcaaggttggaatccgatatggaagtggtgtgactcagtcttgaattcgccactcgcatttgatcagtttggaaaacattccattccgcgtgccttccttcggatatcatattcttcgaatatcgaaggtatccttggctcctcgtcttcctatctttcccttttctggacgcgttgttgatttgaacgcgtcaaacccttgggaccttgggaagcttctctaaatctctccatcttgagttttcaaatctcgaatctctgggtatctacatttccttttaagatatccagagcgcatttagtttgcgacgcgctcttcattctggactcattgtgcggcacgtggacacattcccccgatcatggttgcaaccttttcgccgcaccgggactccggtggcacacttcatctgccatcgcactcgggaatccatcacgttgacgcgagctctgctatccgccaactgaggcgctctctttcgcgctcaccatccaagagttcgaacttcttcctcaacccgcgtgctcattccccctccaaatccacctacatctcttctcccttgtcaccctcacggcgcgcttcgcataacaatttcgtcctcttcccatctcatcaatctcaccagtcgcctctcgccgtcccttaccctcctagcgcgaagattactaggccagcaatgcgtcgacgcacatcaccccgcagtccacccaagcgcgttttgagtgtttcaagtgacagtggtaacgcgactccaactcaactcgtcgctttaccctctggcgaagaaaatgatttgactctcgatgacctcgtcgcgccaggtcaaagtacgaccccagacagcccttgttttattaacactactcctgcccctcagggtgaatcgacttttgcaccgcgctcaagcttgtcgcgcgttgaaaagcgacgtagtgggaactttggcagctttgcgacgggcagtcccttgaagcgcagtgacgggatcatgaatttggaccaagcgtcgcgaggcagcccttctgcaaaacgacgcagcgtgcacacttccaatttctccgccgaatttagcattttcgacaacgaagtcgagaacaccaccccagagggatctccgacgcgcaacgaaattccctctttccccacgcctgtccagccccacagtccattcgcgaccattcctaagcgctcatcttctctacgacggtcgactctgcagcagcgcggcgatcgacctctctttggacggccaagggctttggatgattcgaccgacgcatcaccacctgagacgccattgtcggttaggacgcgaacgtcatttgatagcagcctattccagccaggcagcgagaacattttctcgcctaagccgccagccagccctcttttctccaactccttcgccaaccctcccgtcaaccccactgtcaacgctactcaaccccctcgacccactgctcacccactctctcgtaccatcactcagtcctcctctgggtcgagtatcgaggactcgcccacacatcaacctgtccacaagcccgaaggccggcgaacaatgttcaacttctccaaatctctccccgtgggggctactcgtccagcccccgtaactcggctcacaggagaagacacagaaacctttgcgaccccagataacttcaggctagtgaagcctctacccgcggcattcatgtccactggtcttatttccaagaaaaaccgcaatgcagaggaaaatctcgcattcaacaagagcatgcccgatacaccatgcaaacggcctgtcaaccttttcaccgctgggacaaaccccccggaccgattattcgacaagtcacgtctggttcatcaatcagacgccgtttccgtctctccatttaacccacctactacctcgcgtcccaagccaagtcccttcgctcggggcatgggaatattcggcagcagcttcaataggcctgagacctcgcggcgtgggagtttcgctagcattgatggcgatgaattgattcttgcccaatcgccctcttcccgacacgacagccagcctccaaatgatgacttccctcccacaccgaccaaacagcctttcctcccctctcgcacctaccctcccgccacttctcaaatccaatctctagagcgactatccgagacagcgagtccgctgcacgagaagcttatgcaggcatcacctcacactccccgcgaccagtacttccctcccgacccgagtgggttatcgatatccgtgcccagtgaccatcagtatgtgcaggagcatgatcttcctgccactccaaccggaccgcgagactcctggtcatcattcagaaggcccagtctccaaattagcggctaccatgttccagatgtcgaccccactttgacatcccgctttgacagcgtggagcttattggaactggcgagttctctcaggtattccgtgtcgcgcagcctcatgacgcgtccttcccatctgtcttctctcttccatcaagtgaaccaaggtcgccaacttctctcccccatcaggtgtgggctgtcaagaagagcaagcagccctatctagggctaaaggatcgcgagcgccgtattcgcgaagtcgaagttctcaaggccttgaccaactgtgaccatgttatttcctttatgggcagctgggagaacaatggccatctgtacattcaaacagagttctgcgaagagggtagcctggatggcttcttggcacaagccggtctcaaggcccgactcgatgactttcgtatctggaagattttgctcgagatgtctctgggactgaagcagatacatgacaagggattcatccatcttgacctcaaacctgctaacattctggtcacctttgagggtactttaaagattggtgactttggcatggcgacacgctggcctgcagaggatggtattgaaggcgaaggagaccgcgaatacattggaccggagattcttatgggccgatttgacaaacccgctgatattttctcacttggtctcatcatttttgagatcgccggcaatgtggaactccctgacaatggggtatcttggcagaagctccgcaacggcgatatgagcgatgtgcccagccttacctggagctcggagaccagcatcttccgcgatgcatctggaaatcctatctcggaagggtcatctttcgaggacctttgtacatccgatctgggtgacaacgaattcggcgatgatttcctgacaagtcgtcaattgagcaaccccaaaccacaacgactcgcacgaagcggggagttgattgatccacccagcttcatggttgatgccagccacccacaggcattggacggaattgttcgatggatgatatcccctgagcctcagaaccgtcccacggctgaccaaatcctggaaacttatggagtgcaatttattaatcaacgacgccgcgctggcgccaccgtcttcgagggtaactggggccccgctgacgagatcttggccgaagatgccgaaatgatcgacgtgtaatttaatatcccttttactcttgtgcatacggagggcgttcctgcttgtttctctgcccttcttttttttcttttgtcacctcttcccggtgttcgacctgggccattttccttttcctttttttttttgtcccatctttgatgccatgttttcacgtcacgacatcattcccccatccatcctatgcttcaatggttgaggctggggttttctattgcgggctggggcgttattgatccatcaggtttggatctgggcgttaccttgagcagttcacggataccacaactggagtttgcgaagggtttataaccctgtttcacggatcttttttttttcttttgtacgattcgatacctagcgttacgagatgccagaaatgtaccaacctcacaggatgcttgcttctggaaatggtcaaggtcactctggcattctgctgtattcgttccaacatatctcttatcgtcttgtccttgggagtcaatcgctccgaggcgacaattctttccagggctgatatctggtcggatggcatgcttagttggcttggaaacgtcactgctatctttgctcttttcttttgccttttctaatgatcaatgtgtgccctctgggcagtgatgaccccctatccattttctttgagcgtgatcttctctgctagtttggtgtctttggttgaacacctgggttccatgtctgtgtagtagtaactgcaatgacgaactgaaatgatatcctacgagcatcttgcttcaattgtatagtttattcccaatcaaagtataactaccgttagttatctatacctatggttagtcgtattacaagacaataacttcattgtctcgtagactggcgttcaagccttaatatccgatattcaggcaagccgacattaaaaccaatgaggatatgtgatgtgaataccttctggcaagaatgcctctcaatggatgtcgcttcagctcgatacaatcaatcagttgcctaaagaaattcggggaacaatacactatatccttttttaaggccattacacgctggttacttcatagctcgctgtattttatcctacccactatatttaattccataagattacgtgggagtacgggggtcttatattcaagacaaaactatgatttatcttcatcttttgtctgtacagcgcacgttgtatactcccaagcccaaaatatatttcggattgccacgggatttcttggcatttggcgcaaacttctccaacttcttgttccaaaccatctttaacctcgaaacttggcaccctgctctgcaagtctccctttccctggtattgagcttgacttattggatctctacactttgtgcaacatgcgccgctgtctccaagaccccgactcacaataaccgcaccttacctccacctcaagaagctccgccctgcacatcaacttctttttagttttctctctcccataataacagcccatatcacgcaccatggacaataaagatttcgtgtcggaaaatcttttccgcctaacgggcgcgtcagagcccaccgtaatcgactttgtactcgcgaccgccagctcagccaagtcgacctcctccctccaagataccctgacgtccttcctggatggcatagatgccagcgaaattggtgcctttgctcgagagctccatgcccgcatggggaagggcgcacagtccagcgcctctgcctccaaacccgcaacgagcaaggaatccacgaaaaagaagtaccgtctggtagacatgggcgaagaccaaccagaacccgccccatcgctaggaccgaccaacgtcgaggcagaccgagagcgacggaaaagacgggacagagacagcgacaaggataggagcagcagcaagcgagactccgagcctcggagtcgcggggagaaggacgacagccgaaagcgagaccgaagccgcgatgcagagagccgcgaccggccacggatgaggaagctccgcaagaagggctctcaggacttcgacgatcgatggggcgacgaagagatcctcgaacagattgtcgaaaacgagatttacccgaaggaattcgaagagtcccccccaaagcgcacacgactcgatgatggctctgcgtctcccaatcccgcgtcactggccgacgatatcgatatcgaccctgagaccaagcaagagatcgaccgccaacgagatctccgtgaacgagacgagtttgccaaacgactagctaataaggaaagtagcaagtcgaagaagattgttgaggatcggacgcgcgacggcgaggctgcacggcgacgtgcgctgggcgatgatgccagcgcacgggcttcgatgatgcccgatctgcgagaacgatctcgacaggaatacttgaagaagcgcgaggcagaacggttagcactactgcgacgacaggttatagaggaggccgcggagttgcgtgaaaaccccaatctgtctcgcaaggagaaggaggagttcgcgcgcaatcgagaggtccttcgtctcgccgaggaacggcttcggatcgacgatcaccgtgatggctatcagatgccatccgactatattacggaaaaggggaaaatcgatcggaagaaaaaggaagaggctctgtacaagcggtacgtcgagcgtgatgagctgggccaggagcgattcgtcacagagcacgaggagtgggagctggagcaggcggccaaggccaaggcacagatcaaaaaggccgagttcgtcgatgagggagactatgagtacgtcttcgatgattcgcagcagatcaactttgttatggacgccaaactcgagggcacgcaaaagccaatgacgcaggagcagctgcggttcaaggagcaggtcgatgcagcagagaagaaagccctctcgatggaggaaacccgcaaaagtttgcccatctatcaattccgtgatcagatcatccaggctgtggcagagcatcaagttttaattatcgtcggtgaaactggttccggaaagaccacacagatcccacaatacctccatgaagccggctacaccaaggatggcctcaagattggttgcacgcagccgcgacgagtggctgccatgagtgttgctgctcgtgtggcggatgaaatgggtacgaagatcggaaatgaagttggttatgccatccgatttgaggacaataccagcgacaagaccattcttaagtatatgaccgatggaatgttgctacgagaactgttaacagagccggacctgagccagtacgcagccttgatgattgacgaggcgcacgaacgaacggtgcccaccgatatcgcttgtggtctgctcaaggatattgcgaaagctcgacctgatctgaagctgctaatttcttcggcgacgatggatgcccagaagttccagaagtatttcgacgatgcgcccattttcaatattcctggtcgccgataccctgtcgacgtgcactacacttcacaacctgaagccaactacctcgccgcagccattacaacggtcttccagatccatgtcacgcaaggccctggagatattttggtcttcttgactggacaagaggaaatcgaggccgccgagcaaagcttacaggaaacggctcgaaaacttgggagtaagattccggagatgattattgctcctatctacgccaacctgccatctgaactgcagactaagattttcgagccgactccgcctaatgcgcgaaaagtggtgcttgccactaatatcgctgaaactagtttgaccatcgatggtattgtctacgtgattgatcccggatttgtcaaggagaacgtgttcaatccacgcagtggaatggaaagcttggtcgtgacgccgtgttcgcgtgcctcggccaaccagcgagccggacgtgctgggcgtgtcggcccgggcaagtgtttccgcctgtataccaagtgggcgtactataacgaactggaagagaacactaccccggagatccaacgtaccaacttgaacggtgtgattctgatgttgaagtcgctgggaatcgaccaactactcgactttgactttatggaccctccgccggcggagaccatcatccgcgctctagagcaactgtatgcgctcggggcactcaacgaccgaggcgagctgaccaaggtcggccggcagatggccgagttcccaacggacccgatgctcgccaaggcgatccttgccgccgacaaatacggatgcgtagaagaagtgctgtcgatcgtgtcgatgctcggcgaaggcagcgcactcttcttccgacccaaggataagaagatccatgcggacagtgcgcgcaatcgcttcaccatcaaagaaggcggtgaccatttgacgctactgaacgtctggaaccaatgggtcgactcggactttagcataatctgggcgaaagagaacttcctgcagcagcgcagtctgacgcgggcgcgcgatgtgcgcgatcagcttgccaaactgtgcgaccgtgtcgaggtggctgtcagtacctgtgggtctacgaatatccagccaatccagaaggccatcacggctgggttcttccccaatgcggcgcgactccagcgtggcggtgacagttaccgcactatcaagaatggacagtcggtatacttgcatccgtctagtacacttatggagattaaccctcgctgggtcatctacttcgagttagtgcttaccagcaaggagtacatgcgcagtaatatgccgctgcagccagagtggctggtagaggttgcgccgcattactataagaagaaggatttggagagtctagggttggatcgcaaggtaacgaaggggcagggggcggctggagagaagagtcgagagtagaacggataatgtagttgaatagcctcatataaaatagacacctcaggcactcatcttccaaccaatcaccgtccagataattcaaaccgcggcaaatcaaccgaacctcggtttctccgctttcccccagacttccaaggcctctccgaattttatacgtcacgtcagttactgatttcccctttttctctctcaacttctcaatctacatcctacctcaaaatgtctaaaacattcacccctgctgaagtggccaaccacaagactgccgataagggcctctacatcatcatcgacagcaatgttttcgatgtaaccaactttgtcgacgagcaccccggcggcgcaaagattcttaagcgtgtagcgggcaaggatgcctcgaagcagttctggaaagtatgtattctcttctttcttctttcttttcttcttgtttctctttaaaaccaaaatgttatatattgttatgatcggctatcgttcgagtcggctatcgttcgagtcggctattgaaagtatgtaactaacgccgtttagtatcacaacgaatccgtgctgaagaagtactcacccaagctaaaggtcggcgaagtcaaggatgctgcgaagctgtgaatattctattggaaaatgaaggaaatgatatacttcagtgttttggtttgggaggataagcccactgcgggaaaccccgatcagctgcacatcacataaatgtcacgatgttgtatttactccgctagcgaacgttatacccgtgattcctgtctgattattttgctctgtgaatatcaacttactacccggggcatgaatagaacagaatagaccaatataggaggttggaggttggtacatacagaaaggcttcattcttgctcataaccaagtcttatacattatgttcaaatataaacacgaagatcaatacctatatatctaggatctgctgggttgatagttggaatgtcaaaaaaataaacgcccttctccctcccgctgcacgagcaatagtatccgaatcaaagtggtatcaactcgaaaacgacaaatggtaaatgacaggtaatagatgtgtgaggtgagtaaagcagagaataaatatgaataggtgacggtgacaaaatagaagatatgtgcagtgaagatgtacgcagacaagccacggagagacatggcgatgaacctgcgccaaaaaggtgtgttgttgaaagaaagaaggagtaggtatatgataagtagtaagtaatgggcaaaaggtagagagagcgcatgtgaaactcatccactgtagaattagaatccccgccacggatcatcaggacggtatgagaactcgctgccatggaccgaaggcgtgtcaaactcataccgtctctcactccactgactggatgtcttgcggacatggcgctggcgcggaggcgcacgaggacgattaatctgttctgcgtggcggtcgatgaaagcctccatacgcacagtgcctatgtcaaacatgttgctgccagccccgctggaagcacggccactcgcctcggaagtgcgtcggctgatactgctacgacgacttccaatgcctggaggtggggctgggggctgcatggcggggaaatgtagctccgacgagccggccgtggtgccgctgtgtgaagaaggcatagtaccggcgctggagaagctgcggagagcgtggagagctgggggacggggcgcggtgttgctgcgtttgcggctgtgggttgagaaacggggaacgtggggtgcgtcggctgctaggtcgatgctgccccctgggatttcggggactggagccggagcaccggcactgttgaaggagcgtttgtcctttggcactgggcggggacggccctttgcgacccgaatggagtcgcgaattgggtttcggcggagggaggcttgaggtggggttggcgattcttcttgtgggactggaggtagagctgctaattcttggaggccgattgcggaatggctgaggaaggatagggctgttagccaaacgtagtggcgttcgatggttagtgctgtgaatttcagagcacgctgtggtgtcagcaccaggatagagcggttgaatgggatcgaagagccggcgcctttgggtatggggttgtcgtctttgacgtccaagacggattgaatcgtgactataccgaggcgagatactatgttagttgccactccaaccaaatcgaatgagttccttaaagacttacacttccggccacttttgccgagtaatgcaggcccactcgtaggctgtttactactccacataatggagccttcgtacggggcgagccaaacccatcgtttatgtcgcacaccactgttcgtgatattcgccgacacatcgtcagggttcttgccctcccaagtctctttggactcgcccatcccaaatgatttgcgtcgacggacgtatttgaacatccactcgccaaccatagtctgagcaatagcatcaacgacgctggttggctgcacaccaccggtggaatcctttctatcacactgttcatggttccaggtttgggatggagtcgtgcgatgcgagatgcgtttcgatggcccgtaccgctcacgaggtgctgtgatctcatcacacggcattggcggtggccgatatggtcggtatgcggggctttctggggaaaacgttgcggtcgatcgtgacggggaagaaagtgtttctggtctctcggtaatatccgactgtgacgttgctgctgcggatcgcactcggcggagagttgggcgccggacgacagattggcgaccacggtccgagaactgtctggtggctgagcgagtaggacttggaggcccgtcgctaccgttcagcggaaggttgcgtgagctgagacggatgggcacagggaatggcggtgcgatgcttgagcctgtactgccgctctcgaggcttggttcactgggactgcgggcacgaggtttctggtgcgcggcggttccgctggaaatcatggctaatttgcgcatgccgggctggcgaatactggtcataccagaccgctgggaagcccgagaacggccaatattgggtggtcttgactccggggaagatagctgctcgtcgatctcggggagaggcatgccgtccaaactaggtcttgatttcgaagtgatgagcttgccacgactgacagtgtatgcggcaaaagggcggttaaggagctcatcgtcggtgaagacatcgcgttcgccatgcgggccttcgtcatcgctgttattctcaaagccggcgaagagactgcttgaacgtagaggccgtcgaatattggacaaggtatcatctgagagcggaccattatcgttgttaccggggtacgcttgcacatgatctggaccaggtgctctaggaggcttcacgggatgatctgtcggctgatctgttatcagacgtctctgctttcgtttctcggaccgtggcggaaccgggggcacagtgcaaaactcgaggctaggctcttcgggttcagggggaggtagtgcatcttgaatagcagaaggaagaagactggcaggaagtctgacagggcgttgatcgaaacggatttcctcggtttggatggcgacggatcggcaatcagcaattgcccggaagttggcctggcaagcgatgttcttggtctgcggtggaagaacgacactatttcgaggtgaggatggctctgagcctggtgggtggatagcgatcatcggaatgtccatcttggatgaggcattgggggacaggttttcgctttgagcaacacatggttccggaacgacatcagtctgggtggatgccgatttcatttgcaccggctccggggtggactcgacaggctgaggcgagtcagccacattcggcgtccatggaggacttgggagttcatccacggtctgacaagaattagaaaccatctgaggtgcaactgggagcgtggcgctgtcattcgttctaggtattttcgttttctggtcgtcttctttctcgggctctgagacggtttccatgggctcaggaacaatgtcgtatacaaccttcccttctagcgtaggcgacggaggaggtgagtactggatgccgatatcgcggtattcaactgccgggtcaagtttcactgggctagcaagcccgagttcccgtgcacggagttccagggcagtgggtgagtataagtccgagctctgcagggaaagacctaggatcttcctggccttgaaagaaacactatgcgacccctgtgagtgaaccgacattgggcgttcttcgggcagcgcctccggagaggaaggcagctcatcatcagatgggacaaactcatcctcatcctcttcctcgaagtcgagttcctccgccaggttcaaacctgaaccattcttgcttccaggcgcgatactcataactgagtaccgcacgttatggaatatgaccgcctcttcaccttcttctgagctcaaggtggtcacgctcgtgcgtcggcggcctaggctactagatgccacactggctgagtcgctttctttattcttgtcatgaatatggtcactattctcactcggttgtgaacgcgagcggatagtcaccacttcctgggcggctgcgacctcgttcaaaacggtcttcaagcggccctctactacgtgaatcttgcgttccagggctcggcgttcatccgcccaggagtcttggtcgcgactccagagtaattgagttcgttcgacgtcctcctcccgacttcgggcttttttctgtgcctgctcgagccttttacgaacatcgccgatgttctcgaccgcttcatcgcgctcccgagctagctcggccatcgcagatgacgttccaccttccaatagttggatttgatgtttcaacgagcgcccttcccaggtcgcctgggacagattcgtggtcagtgtttcattttcagtccttgattcgtccaagctctcttctaacccatcgattgccttggttttgttctctatctcccgccgtagcgagagaatctccgatacgagagatgcatggagagtgggtgtgatcctccgcgggtcgaagggggatagggtatcctcggtgatatcgatatcatcttcgtctgtttgtccgtcgggggagaatgcgggggttgggaggccaggtggggaggaaggtgtcggggaggaatctcgccggcgcaaggacggtctcgatctcgatctcgatcctcctttggatggagctcgagatctggatctaaaggatggcgccggggaggggtgggccatggaaggcggccactgtaaatcggccatctctctttgtgaatgtgccggatgaaccgcctcaaaccatcgaggctctgctccttgggctaaccagagcacttcacgcactggatcccatcaaaagactaccgtagttcaaccatccgactattgactgctttgaagccggcgcttgtctctctccagagacaggttttcgctcggtgcaatcgactggtcgaacgcgggatggaggggaaattcaacgctgggacttttgacacttggtggaacgaagaggtcagccacggttacaatgaagatgtgtaagatgcacgcttgagcgcaatgccgatatttggatatgcacgggaagagaggccccctaactctacttacggagtactccagtgacaaacaggtctgaccgttttagcttaagagaggaggaagatgtcaatcgggaggtatggcccgattccgggagggaaaatagatcaacccgaaggatgcgagggccgatcgcgattatagaatcccctgagatccagtactctgtagatttacgccgtacggagtacttacgaaggtaatgacctgggaggagtcggggcttagaccattaaaagaccttaggggattagatcagccttgcggcatgcctgcgcatatcggaaacacggacgcgaggagagtcttggacttctaaaaaagaaagaaaaaagtcccaggggcgttcgttagggggcatatggggaaagaaaagaatccacccgattagcccacaggattgaatactccactgcagctgccagacactaagacagatgagcttcagtcaatatcccctgtataaaacgctttcagggtctgttcgcgcgagagagaatcaccagagtgtatggagtatacttggtattgtggtagatctcaaaggtcatggagaagctgtttatttggagacaaagaaacgaggaaaggtaaaaaaagagataaaaacggggccgtattctcaagagaatgagctattgatcagaaggtcggaaagcctggaaaaggaatatgagtgtactccgtacggagtaagattcatagattaactgcctggggtatgttgtaggagttcgtgacagaactccactgcgtgtctgggccatgaagctcaagcacttttttgacctgggaagatcaccccctattttgtttggcgaaatcatggaaggcaaaccataaaaataagaaaagcctttgcaatgaccaatagtttcgattccaaagacactaaaatagcaaaggttagcgtgtttgataaattaaatggctgtgttggcggccaattcgtagctcgtttgggcgacgatcgccgtacgcaatttcgcagagcctagtctggtttcagagtttccagggtgtatgtgtcgcatatgttgcacgtaacctgtcgcacgttgcatgttgtgtagtattggttcctttttgtgatgattatctctagacagtcaaatagtcaagaatcgaagcatctcggacattatcgcggatcaggggtaaaaaaacagacccatccaaggtctccaccgagagcttcgaagaacgaggaacccacattggccgaaatgaagaaccagacattcatccggacttcacaccacaatggatgtacgcgacactctatggcctccatggcctcggtctgtttctcttgcatatgtcgatgcaagtgccggtcgcacagctagcaaacgtcagaggtggcgtatgagaatcgccaatgattggcaataaatgctttattatcgtatccaatggacgaagtaggtacggagtcatgtctagactctgaatgtcaagcccccaaattgccattggaaatcagactagcagcggggtttgacacgaagtattaaggaatctccgcgaaccatttccacccatttgccccactgacctcaggggacgggacgccgggtactttttgacttggacgagggccgttgacaggtcgatattcgctgatatttcacattcctggtcggtttctttgtctgacagtgctagtggtgagtctagattggaggcgcagacaatacacggaagggctgaagctgtgtgcaaagtacttcgtatgtactccgtagggaaggtcacttataatagaagatcgtcgaattgaacaatagtcgtgatgattagcttgagaatgtcgagagcattgaaagaaggcggaaaaagaataggcagaatgttctgtgccaccttttttaagatctcgaagactcaacacataaaatactccaacttcttacaatgcatgtttcgagacaagtctctgagaactgattccctttccctttctccaataagatccgccagaacaatccggccgttagatctagagatgcgattaaccgggctgactaagcctatttgcgtcattccctggacatcggcatatatagacttatgttgtacatgtacatatatccagctgcgatctcaactttgttaatatcccacctggacagacatcggaaaccgacataatctcgaaagtgcggggaacagctgcatatcaccatcatcatccaacaccaactacataaaatgtcgacagacaacccgccccagatgttatttttcgatatgtttggcacagtagtttcgtggcgtacatgcgtcacggaagagctgagtgtggctgccttacatattgttaattatcccagcaaggacctcccagccgacttgcgggaccgtgctgcggccatgaccagtgacgactggctggcttttgtcgcagaatggcggcagacttacaatgtgttcactagtacatttgacacatccgaaaagtttatgtccgtcgaccagcaccactacaatgcgcttcaggacctcttgcggcagcgcggtctggagggcctgttcactgacgagaagctgtgggaactctctttcgcgtggcaccggctcaacccttggccggatagtgtgaaaagtcttgagttgttgaaccggcgctttgccacttctaccctgtcgaatgggaatgtctctttactgcaggacctccaacgtcatggatcactgcctttcacgcaacttgttagtgcggagaactttggggcttacaagccttctccattggtttataagggtgctgccaggaagtttggactggagccaggccagtgcggaatggttgcagcgcatctgcgcgatttgaaggctgccaagagctgtgggtttcagactatctatgttgagcgtgagctagaggaagagatgtcacaggagcaggctgcgaacgccaagactgacgggtacgtggatatgtggattgatcttgagtctgatggcttccgagaggtggctaggcgatttggggttgagtaagaccggtctaccctctggtctggggctagtagttgagactggttccggtggacaacgtgtatatttggacaatttgaatgaatactcgaaatataatcggtccatttagcccatcctccattccgacatgtattttgcctctcccatcgcctcattccaaatcccccaacatcaagcccaaaggatattcaattttcgccacccagtagctggagaaggtataggttctggattttcattcgcgatgtgaagaaattcgcggattggaattccttccagtgggacaagccgggtctttcgccaaaatttgcacccaaaatatagggcaaatataagcggaatattgaagtatgacgatacaaagatctgagaactccaattgccctcaataaacacatagaatccacccgtgagcagaattatactgaaagaaaccagagaaatccatgccgcatagggttgaaatgggctttgccaaggaagttcagtacggctaatcttttgcttcttacagccataaaaaaacctcaaatagatcacctctatattgatccaatgcaccaaagaggcagctgagaccagttgctggagccaatcaaatacaacagaagctgcggatgatagcgtcatataccccaaggcaagaaaagatccgactgcggcaaccgatatccaaggaaccccgaagcgattgatgcgagtgaataattctggggcatgcccctcttgagcaagtccatatagtgtcctggttcccacgagcatggctgtatttgggtaagcagaagtacagcagccaatggaaaaatgcatactcaccagaattaccagcgctccatgcacttgtgacaacgacagcattgatgatcgaaggtaccactttgatcccgacattagtggcagcaatcgcgaatggagacgctccagcatccccggaatttgacagcaaccccttatcattggaggggacaataaggcccatcatgaaaatggtgatcagataaaatatcaggattctccagaacacacgtttggcggccttggggatgttatgccgaggattctgtgtctcagctgctgcaaccgatatattctcgacgttggaaaatgcataggctgcactactcaagacacgccaaaacccaaggaaccgtccccatgagccgttgattccgagaaactgcacaaagggtccagggtctcgccaaaatcgaaaccccatgggataaccccgtggacctgcgccagaggtaatgcatacactctatggaaatcagtcaggaactaaccagaatattgctcgagatctgctcaccatgatattcacaccaacaatcagagcaatcttcaacattgcaaaaacaaactccaactcgccgtaaatactgaccaacagcatattactaacgatcagcagtgcgccaagggcgctaatccatactgcatggttaatatcagaccaaaagtcgatgatgacagcgcaagccaccatttcagccggcagcaggatagcatttgcataaacactattccagccttgtgcaaacgccagagcagggtcaacgaaccattcggcgtgtcttatgataccaccggaaagaggcgccagagcactgagctcagccacggaaaagaccacgcagcatataagcatacccacaatgcaatatgccagcaacatgcttagcggtccaccccttgctaaggattttccggtcgctaggaagaggccagtaccgatggtcccggccagggctatcatttgaatatgacgttgtttcagccctcgtcttgtttgaacgagctcggaaatgactgcctgtgttttagggttgtcttcacccgcgaaggtacgtttgaggagaggtatggcctcattttcactggtaatctcttcattttgctctgagtgctgagaatgactgttcatttcaaatgatcggatgggaggggcaaatgaataaaagaggacaactaaaagggtgaagaggggttaaattgagaagtgttcttaggcatgtgtgtggttggatggtgataagttaagaagaacttatattgaagtcgtgacaagaggatgtttcttattggtgcatgacctgcagccccggcccggttgatattgccggcaccaaaaatggaagataaaggatatatcaccttttctttcttcctcgatataatcttctatcctactttccgctttggcttttcggaacctaggccaagaataatcttagtagaatcgccggagtcggtaacattgaattattatatgtaccgtgctgaagacagtcgtctcgaggcaggacagagagtagtgtggccgtattcctattggtaaaatgccgagtaggagagttaatgaatctggaatattctctttattaggaatataactacctagaggcgctcctatgatagctttaatattataagagtataagctttatattatttatagttagttttaaaaatactgctaaattccactctttccttactatctaatctcaggcagtggcttactataccctattcttatactatcggataatctcctttattatcactcacttttcactcacttttcacaccctccgcacaactatcgtataaatataccttcatcgctaaaccatcgagtctgcactgcgggactaccaggcatgtataccatcttcgattgatactaggagaccttaatctcgcaccccaaacattcaagttccacctagagagcactagagccgaattgctagcgaaagatcttaattcaaacaagatggcctccaagcctcaggactcaccctcttggatcactgaagatggtagcccactctgcggattctactggatgagaatcgatccgaaagtgcagcctaattactgggtgtaagcatgttttccctaggtcctttggtggatatttgctcacgcataaattctgaagccaacctaagaaattgtgcgaatgctgggagcacttcccaacccagtggccggttgaccatgtaatgatcgtgagaattctaaatcaagtcgccctaagaggtaacctttccatgactgactcttgtcggtctatcaaagcaaatccctgcatgtgccttcaggtgcccatattgcacggcactcgataacgtggaaaaggagggacgaccttgcccggtacgggtgaaaagacatatcaacgcagcgcatatcgtgagtactccagtatacttacccagggaatgacgctcatatcacttagagaagacaaagagacttctatatgggactacagatttcctgtaagtgtgcctcaaagtcgaaagaagtctatgcatactgacctttgctgtctttagtttcaggttgcttccagtccaatgccatctcaactcgcagtgcagtgaagaggaagtcccgtccgagagcccacatttacaatgtgcatgagaacaggtcgccatagttatcttatgaaccggctgaaaggacacatgaacaatgaaaaattgaaccctcaatgaagcccagagtctagacctctattgcagggcttggttttattcaacatgatactggcacccacgagggcaataagtgcaatgagaagataggggcgtatgataagaaatatttatcactcggataccagcgggacttcttggttagtttctaggtaaacggagtggacgaggattccaaaggcgtgtctgttgtatcgacgaagaccctgcgatcaaatttggtcactcagcctatgcttactggcttgctctatttcggcgatataagatgagtgtttattgactttattgtctaacgagttgatgctgagattctgcagttgaataagaccagcataaaccccttgcttgaccataagttcagtatgattcccttcttccaccgcccatcatggtggttttatcatctttgttatactagaaagacgatgtgcaatcgagatcatgtctccttcagagcacggccgcgagaatttccttctcgctactggagtcgagggaaactgtagctatattaagcccaaaatcccttcaagtccttgagtagagctcacgcgaccgagtttcgttgcttttggctgtctctcacaacattccgttggagcccacgatagtaccgactcagagagccgataaacagtgctgtgtctgtatttcatttctatgagcctgtacaggcttgagtacatattagctacctcgtgttataatagctactttcttttgtttctgtttcacattggttagatgctgttatagggatgatcaacccaagcgaagtagtatcgaagtcaaacgccgatatcggaaaatgccaatataataccaataatacacactagtaaaatatatccaagccctaactcccatcttaccgctcttcgcgaagccggtatcggaacatcgtcgttgcagctccttatctgatctcttatcagatctgacgcacattgccaaactagtctgcacctgggtattggtaccacctgcagcacacaatatctcgtaatgcaactgaaaattctcactccaccggcccagggagaacccggcgtgctccaccactgtgtacatcacccacccacccccatagccaagtcattcataccctaacgccacctcgcagaccaaatccctcgtcgccttcgaatatacccgcagccatgtacccaagccacacaccctcatctttgtcggcggactaggtgacaccctcgggtcagtcgactatctcagcgacgtagtccgagcgctagacccatcgcaatggagcgtattctcgctgatcctatcctgcgccggcggcgggtggggcatgggccgactgggcaaagacattgatgagctatcacagtgcgtctcatacgtccgaaaatataaggagccccaattcggcgtcggaaaggtggtcatcatgggccattcgaccggcagccaggacgtgatgcactatattaactgtcccaacccacggccagcacaccctgtcttcgaccgccactggaagccgattgtgcgggtgccagttgatggggcgattatgcaagcgccggtttctgaccgcgagggcatattgtgggttgtgaaatgtggcactgcgcgtgatagcccggccaaaatgcgcgcgatgtacaataaggctgttgctgatgcgcggcgggcgatgtatgaggatcacgatcttgttgatacggttgtaccattgagtgtgacgtcgcggattgggtatccgccctctgcgccggttagcagtcggcgtttcttgagtctggctagcccagatagtccggaggatccgtctgaggatgatttgtttagttccgacttaagtgatgagcggttccgtgcgacatttgggatgattcgggagagagccttgctgaggcagaaaatgctggtgctgtactctggaagggatcaatcggtgccgccatgggttaataaagaagccctattgaagaggtggcagattgctgctgatgggagtgggcggcaggtctgggattcaaggagtatggttattcctaatgcatcgcatgccctgagtgatagcgatcaagcggagccgcggcggattttggtggagagggtgacggcttatttgaatgacattcagcgtggatgatttccgccgaattggtgagattgtatgatatttaagcaaaatatatttgatcctcatatgaaagagttctcagaatccgggaggtcaagaccaacgaaatagttcaaaacaactctaccctgtaagtgaataaataacggtacctgcactggtgaattccgggctaaagacatcgactgtaagcctaaggcggctgctagttgtaccgaagatagctctagtagtctagtcagaccagccttgatatagtcaacttctactgcgaccagttattgtgcaactatctgcatgatgccgcaccaccacactagtactataaactatggcgaattgaatgaggacactattattgatatcgactccgatatagctgacgatgaagcgcggccacctatcttaatgacgatcttgacagcttttaaatatggtatgcctctattcttacccaccacagtagtcagtctaaagcggttaggaacggcagaaatctcataacaatcctattcttattccactaccgaggctgaagactaaaacggcaataagattacaataatcctacatgtttatagcttaagccttttggccacatggcttcctcccctttctccacaaatattgatacatactatctattattgagccttgacacgctcacatgatgttgaactagtcccaccagcatcgttgatccaatcaatagcgtaacgggaggatcatattattgaccccaacacgttttaaaggcatatcgtcggggatctttcgggcacttggcacattgagatcgacatctactgtgtctacaatactccgtatacagtgtgcaatatacgcatgtgatcggaacaaccttggaaagatggacaaccccctcgagcagtatttaagtcacggatcaatattgaagatcccccaagccaagatcgggccgcaaggaataattttgaaatgtcacatcgagtccatttccaagaatcaattagtttcccaagggccaatctgctgggaaccgccctgccgatcgctggaagccgcaacgcacgacggatgcaacacatccacaaaccaatgacagatatattgcagattcaggggatatgaccaagagccgttgcatcatgcacgtcaacacaaggcaggtgcaaaccgaatcccgtcaccggtactcctgagccgatatgaacaatatgctcgagattagaatcctagaccagggcgagaccatagcggatcgttgaacggcacaaattcagcgttccccatataacggccaggcgggaggagccgttgaccaaccaacccctgccccttcaatgaaatgcacggctactgatggtcccacggaaagagctcccccttacggagtagcatggcaactgagccgttggcccgggccattccgtgtgaacagggggatgaaaccatcctaggacgtgccctagcaagttttgatctttaaatgctatgaatatgctgatatgagaatctaaaatataactgcagtttagggttcttctcttgaaagttgaccggaagaggccgagccgggatgtacttctttcagagaaagagaaggagaaagaactggttccgcccgggcccggcctattgcattcaaccaaaaaagtggacggaaacagtttccccgatataactcctcccctggcccgcggccacagaactgggacgggaaaagggagccattccggatcctacgagttgatgcccaaccagttgcctactagggaaatagagcagcagatttgttcgatgaaaagtaagaaaaattaaaataaaattcaagccaagcaaattcaaaaaaaaaaagaactcatacaacaggagtacatagtacatacccaccttccgaacttcctcccgttgtcttcttgcccacctttgtagctagcaaggcccctaggacgatctatgtatcaatggggacacttttttttttttacgcgcccctccacgggtggacattgcaatggcatgaagactttgacattcaccggtgactataggctatttgaacctattggccagatcttaggttgtataccggatgcatgcgcaagagcggaaaaatgacagtgacaggggtcgaatggacagggggtataacgtggaagggacgataacgagagccaatctaaggtggccatgagccatgactcgatcctgaactagttcgaggttggcgttgaacagtcacagagatggatgttccggaatcccaaatccacattcatttgacttacgctattcgggtagcgtctcccagggccatggagagagggagacttttgttccagggtgttataattgtaaggggagtatggagtacggatactttgatagtacgaactcccacgtttcaaaaaccacgagggagatggggacatcgtgtgccaccatcgacactaatttaattaatcccattctaattgcaggacttgagatagtatgtacaacataaagagaacatcccatgcataataaataatacatcttcatggtagggcagtgaaaccatagatcgtgcccccccacgtgtagattggggtacacagtgccttagtttgagctgtacctagacgaaccggcccaaattgttaaattcaaaacaagaagaaaagaaaaataagaagctctcagcttctgccggcagggaaatgagcttcagccaagttacggagtacggagtacatccgggattatccactgtgccctgtgcgcttctccttttcactgtggacctttgggacctgggctttttctctcttttctgttcttctttctttgggttataactttttttggggtatatatgggtatcttctggctcattttctccgagatcgtcggatccggtgtaggttcagtggaatgggcgtccagttccagagatcttcggatggacggagtatatagatggctttttggggtatattaagataatgaaagggtgaacagaagaccccaaggtaaatatataaaaagaatgaataaatgaatgagtatcagcacagccctagaaacactatgtggatatttagaaaatgtgaaagaaaatgtatgacttcatggagctgtcacttgggctttttctccctaattataagattcctaccagtcagaatgaactctccgatgtctttatttttcatgtccttttataggtctagctctgattcatttttttcctttccacatccgaaacggtctcagagttagcgatgtagagaataacgaacgggggatagggatctcgggagaagtacaaaatccattctctttcataaatttggtatttttatcttctattctgttcgatatcctgttcgacatttctctttccttaatattctctatactctaattctaatctcctaatatcctcatatccctttcccttgaacccctctctccacttcgttccagcccccggaccagacttcgcacactggtcttccccctctctctctcttgtctctcggctctcccttctcttttctctaattccattttctctcttcccttcgctctatatctccccctttgcatcattcttccggcaacaattgggggttgctgtgaatcgcgtggaagctcccgcttttctttttcgcccccccgcctggaacgtgggccacttcactcacctttcccccctccttgcgacttcgaacatccccccctctttcccctgaaataattataggtatgtcgtggacaagacggtatcgctatagacgtactgacttctctaggctgattgtctttgctgtttcttgttctcagttccagttgcccgccatggctggaaaaatgacgttgtacaagctggtggtgttgggagacggaggtgttggaaagaccgcccttactattcaggttggtcgacctagcccttgacctctgggcaacaattcttcatgacccatgactaaaacctatccttctagttgtgtcttaatcactttgtcgaaacatacgatccaaccatcgaggattcatatcgcaaacaagtcgtgatcgatcaacaatcgtgtatgctcgaggtgctggacacagcgggccaggaagaatataccgcgctacgagaccagtggatccgggatggcgaggggtttgtattggtgtatagcatcacatcacgcgcctccttctcccgcatcacaaaattctacaaccaaattaagatggtcaaggaatcgtcaagctccggttccccctccggccccagctacctgaactcgcccatgaccgcctccgcgggtcccgccatgcccgtgcccgtcatgttagtcggaaataagagcgacaaggccgtcgagcgcgcagtctcagcacaggaaggccaagcattggccaaggagctgggatgtgagtttgttgaggcatcggccaagaactgtatcaacgtggagaaggccttctacgacgttgtccgcatgctgcgccagcagcgacaacaggcagcaggtggccgtggcgcagaccgtcgcccaacaggcttcggatcgggccgcgatcgcgacgcaggccccgaatatcccaagtccttccggcctgaccgatcgcgacatcgcagtcggctccagtgtactctcttgtgatcggccgggtccgtccgggaggcgttggatttcttgctcactgaaataatggctgtttcctttttctcttttcctctcttccttttggtcccgggtgcatctggagggtggttctatcttttggttacttcgttcggcgtcggtggtccttgccatgctacatcttttacgctcgcattttgaagagcttgagaaccgacgtggagatttgaggccagtgtctgcaagcctcgagcgcaaattttttcttttttgttttggcttttgttttgttctttcgaaatgcgccgagacatgcagactggctgtctggatttccacaagctccgcttactctttttccttaccaatcgtctctcttcttcggtctctgcttatttgataagttgcgaacggaggaatctttcggacacgccttggagcaccccgacagaaacaaaaaaaaaaaacaccccccaggcaacgaagccagaagatcgcagtcgcgcattagcaggcatttcgatatgataccctacgactgagcttgttttatttgattaatttctcagccatttatgcgatatagacaattgataaaggtcttttttttcagtcggttgtaataatttggaaaatccgaagcaaaagtacacctgagtacaagtgcagtacccgattccaggccgtacttgagacagcgcatgaggtatactccgggtatactctgggtatactctgaggctggggacaagctgagtacagaagaaagtgcggggaaaaagcacggactcgcctcggctgcatccgggggatctcagcttcaccttctccccgcaaatggcgagtcacacacacgaacgcctaaaatgtcttgccgatcagagccttgcaggtcttaccttccatattcccgtgccaatcgcaatattggatccgaaacacctcgggtagaagcgctctatatcagagctcctgagtactattctttgtcttgtatgagctgtttctctcttctcggctcaaatcacaatcccggcaaataacttcgcctcttcatcatttctgtagactgaatccgaaacctatccaacatgtcttcgcaccctcaaccgacaacccactcacattcccttggcgatccagaaaccttttggtcccatcatgcggccagactccactggcaccgcaagccttcacgtgccttgacgcggcagacaaagtctctcccgagcggaaccgagcatgagcactggtcgtggttcgccgatggcgagatctccacaacctacaattgtgtcgaccgacatgtgctcgcaggccacggtgacaatgttgccattgtatgggaatcaccggtaaccggtgtaacggagaagtatacttatgcccgcttactcgatgaggtcgaggttcttgccggtgtacttagggaggaaggggtaaagaagggcgatgttgttattatctacagtatgcaattgtgaccacaccacaagtggagaattgattaaagacagaaacccactgctgactacgtatcggatctagtgccaatgatccctgcggccctagtagctgcgttggcaataacccgcctaggcgcaattcacgccgctgttttcggtggcttcgctccgcaagctctggcacaacgcatcgaggccgcccgcccaaaagttctaatgacagcgtcatgtggaatagaggggtccaagggacccatttcatatcggccactcgtcgaaggcgccgtcaaggcaagcagctttaagccgagcaggatcattgtctggcagcgtgaccaactgcgctgggatcagcccgataagcgcggtggccagcgtaattggcagagactcgttaagagcgcacgattccgtggggttaaggctggacctgttcctgttaagagtacggatgcactttatattatctatacaagtggtgagtgaatcccagaaccgaacccaattcctgatctgttttgttcatacttaaacgtttccacaggaaccaccggcctccccaaaggcgtcctgcgtgaagcaggtgggcacgccgtgggtctggaactctccataaagtcgctcttcgggatcaaaggtcccggcgacacaatgttctgcgcatcagacataggctgggtcgtcggacactcttacatcctttatgcaccgctgttagtcggcgccacaacggtcctgtttgaaggtaagcccgtcggcacgccggatgcagggacattctggcgcattgtcgagaaacacaatgtaaatgccctctttacagcaccaactgccatgcgagctatccggaaagatgatccggacgaccagcttatcggcgaggtcggaaagcgcgggggattgaaatctctccgtgcccttttcctcgctggtgagcgcagcgagcctggtattgttggctcatatcaagatcttcttcggaagtatgcagcggatggtgcgcttgttattgacaactggtggtcgtctgaatctggatccccgattacgggtgttgcattgaatgggagtgctgcccttgctagtctggcatccgggccagatcattctcctctcacaacccgacctggctcagcaggtttcccactgcctgggtttgacgtccgcatcgtcgatgacgagggcagtgaagtcccgcgcggtactatgggcaatatcgttatggcaccaccactcgccccgtcggcattcacgacccttttcgaggacgaggagcggttttaccgtgggtatcttaagcgtttcaatggccgctgggtcgataccggcgatgcggggatggttgatgaggatggctacgtgcatattatgtcgcgaagtgacgatatcatcaatgttgccgcgcatcggttcagtaccggtaaggaagttgcctttctttcgctttctagattattgaaggataaacgatttgactaattcctacaggatccattgaacaagcaattctctcgcacccattgatcagcgaagcaagcgtcgtcggcatccccgacccgctaaaaggccaccttcccttcgcattcatccagcccaaagccggcccaatcactggaaaaagcaatcctcttccagcaacaccgaccccgcagttattcgccgaggttaacgcgctggtccgcgagcagattggggctattgcgtcgttgggtgggattatacagggtcgggggatgatccctaagacgcgaagtgggaagacgcttaggcgtgttcttagagagcttgttgagtatggggtgaagggggagtatgcggcggagattaatgtgccgcctaccgttgaggatgcggaagttgtttctgttgcaagagagagggttagggaatattttgaggagaaggagaaggcaaatggggtcggcaaggcgaagctttagatgagtgatagatggatgtgactatgcggcacattagagcgatctgctttgactagtacttgaatgtttcgatacatcaaggggttcataaagaagctaacagtcttcagcatcatgcttatcttgttataagttatttagttcagcgatatatgagttgaaggatcctgttcaatggattacatcctaactcgacaagaaatttgaggtgtagtaaccaagtccgatcaatcttctgtagaatacatcgtgggcagcccctataatcagctgccgtagctagcatcatacaacataccatccttcccctgagctactggtgtaacattatgcctcaattttaatgcaaactgctggtaaggtctctacgctgggctcacctcatataaaatcgaaatctccacattcctttcccgttacatcctcgctctcacagagctgaggagaaagggtttgtcatctccaggaattacacccgcagttgccgtgcactcttacactcgacaacgatatacatatctcatattcataacgaggatttgtcccaagatttatgaatacaagttgcaccggatgttggatatagtcaccttccggatgccggtagtggctagggttttggactatcgaactgcttgtgtccgccatgtttacactgctcgagcaaagacaacaataatttggtggcctatacttcagcagagggtgatatacccaggaattgaagttataccgaccgtatagactcaattttaaagctacctggccgcacaaaccgcctttatacgaaggtcctgggtaatatcaaagatattcccactacataaatttctaaaatctcccatttctaggcgttaaagcctcttgaggcaatcgaccatgtatcgttaatctcgtcgattctactgccccctaaccgtatataccactatatatccttatcgtcattgatcctcattgatcccgacgaaaaacaggatgtagggtgtgaatagcttcatgtttcaagcccttaaggcgttcttaaggatcctgatactctgcttactaggtaggagattgtcatagaaatacgctgcacaattttccgtcatgaagctattcccatcatacaaatctctgtattcccccaggtctagggtggtttgaagatgttccgatcgtacaaatttagcttcgggctttagtatctcgcatttgaaagggtcgagatcaatccgtagaggcatacattgacgtgcggtatgaatagcttaaacgccaggaactagagagagatggagctttgtacggtcagaagaagagcgtcaacgtcaaatccgagggaaatggagatttgtatagaatatcttcaatgttgtgcaagaaatgtagatttgttgaattcaagagagagagagaagagagccttccttccgctcttctctcccctttctcgtgactttgaattctcccaatttgacttctaccacatctgacatgaatatttcacgagttcccagccttctcctcctttactcccctgctaatcaagtagtaatcaaatattacactggaggcattcaggaatgaattctttccagctctcttgccctccctcctttgcatttccaactccttaagtctccactctggtcacaatggagatctcaccttttgtttacaagcttaaaatcctgaccggtattcaccttgtcaacttccccattccaaaatcccgatcaccgagtggtctgaagggcacacatatgacgaggtgagcgaagattgccccaagcatagatttctagatagacaccttccatagccgatgtactgcttcatcttacccgtaccgcccacgtgaccgcatatcccgctatcatattccttcccctgagctatcagcgtaacattacagcttaaagcacgccaaatatagaacatatttatgtaaaagtagactagatcaggtaaaactcaaagtgtttgcccttgaacctctcgagctgacaggcgagaaaggccgttcttctgcttcttgttattcttcctccactgccacctttcattccttgttatatcctatgctccccctccaagatggagccaaccaagttcccaaagagacccacggtgcgatgggacccatacaagcgacaggtactctgctgtttatatcgattctttacttgcaacaagaaacaaaccgcagaaatattttcctacatgtttcggagccatctgaaacagcgtggcattcaaggctttgttccatttgccacccttaacacccaatggatttggatgagaaacaaacgggatccagtctggctccgtgtgcatatcaacaccgcatttgagaccagtggcgagtggggggagattattacaaagatcaaatctgcagccaaaactttgcggttcgaactacatgagaagatggaggacgatactcacccatcgcgctgtggtcctttggtgcccgatgccgaacagaatattgcatccgttagtgacctcgaacacgtccaatctgcatgcaagctaacgatttattctcctagcatggacccgctgtgccaatgctttcccaatcattgtttactgcggagactctcaatccaataccattgttgtccccgagccaggaccaagccttcgaaggaagatacagagcgaaccaaagcgccgatcagagcatcgaccagagcatcggtccgcagaacgaccttcacattgatatccccaatagaccccacagatctaccgagccggtggtcactagcaacggaaagttgtgcctctggtgtgagcatgaaggaactatccacgagtccgaggacatccaggaactgcaaaacgaagactacgattacgacagtgaatatgaggagcatagtgatggcaatcagcataatgaccgacaagacgatcctggtatgacagattacatccaaggatgcaaacagttcgtgagggagctacgtggtgaagaattgtttgattcagagagcgagccgtacctgttgaaaccccacaaaagcctctcaagaatgcactcattttgcgacccgcacttgcccttaccgctaaacctagaacaagggtctctggattcggaggataattcagattggtgcgctgacagaggaatccctgctaatttggctgattttgggagcctttcaatcgcaatgaaaaatcggagcggtgcccttggcaatgagcgaacttccacacaaaaaagttcgcgcagtttcagtttctcccatacctgcacagatcacgatgaggcgctcggcgaccgcttaggtggtcagaacgcattgcagtatgaatggccctcgaatgatagaatgaggatggaaaccctgcgccagatgtccgtggaagctctccgtcaggttgaagaccagtcaaccactcacctatctcaggaggaaattgatgtcttgatgtatgacggcaatacctggaagcagttgtagggagagtgagatgcatatacataatggggtctagattcaagtgtctcatatttcacattatcgaactaggaattaggcccctaggccttaaacaggaaccttggtttttgttatggtctagtggtagaatgtgctgtatactttccatcagacaccaatgtatcaatccaaattttattaatttgataccaagttcaagcatgggctattatgctgtaggccgctaaaaagtaaacagcctttgcatttctctatcaatatgctaatcttgactttctcatgaaagaaggcgggctcaaaccagatctgagacgggctttttttgtcaggtatgaggaacataaaagggatcaactgaaaagctatcagaaaaacagaagagaaaaataacagtgaataattggttagctcaacctgaaagaaaagagagggaaatatccatattcaatactcatagagtaacaaacatcaatgatggctttagggttgaaatgttgtagggagaaaagggatggggatcgtgtgagggcggggataaaagagaggatttggtggttatggtaacaatgaaaactagaaattgcctagttgactatcgagaatcgtgaagattcgaaggttaaaatgaaaagagagatgtagtttgcttcatcaatatatctggaagtcaccagatgcacctaactcatgttgaaccaggtaactatgttaaatctttcagctgctcctcaaactttgcccactgacccttcaccctacatgcagaagtccagtagttccctttctcatcctttccgaggataaaaaacccgtccgcaggcttcacagggccgtgattctcctgaacatatgaaggcctgcacggcatgctgtcgtctttagggccctgacgagccggggaaaaatctaagttgaacaagccagctttcgaccaattggagaagccgacctgcgccatgccaccatctccaaatacgataataggtagaccggttccggatgtgcgaaccatggcgtaatatgcctcatgttgagcacgcgtgccctgctcgttgatagcgcaccggacctgctgtgcgagccagctgagcggcttggaagttacatcgcccgcggtaacaagtacgttggcccagccgaaagcgttgccaacgtagggatgctcggtggaagcaggcaggaggtcaccctcaaaagatctgcggagtgacatggcgattgatgtagctacctaaggagggtgtagtgtgagtagcttatttaacagggttacagtattggagtttaccgttctctcagggttcatccccatctcgccaaccacacagcgtaaaatccaggccgtcagaacatcattctcagtcaaaaagaccttcgatgggtcttcgccgttcgcagtcgcctcagtacaaagctcgtctacagccttctcccattgcggccgccaatatgtctctggaatacagaccatgcggttctccttggctcggacaagcatatcgaccccataacctaagccccaccgcagcaagcctcctagcccgaccctcctgtcagtcaacacatgttcctcggtcgtagggcgcgacccctgggcgagagagtggaatggatccgagtttataccacatgggatcaatacttcggcagtttttccccaaagcatggagctccatcctgcgacgacatactgcatgcccagcgcgtcgaaggcagcatgctgccattggagcactacgacggtcttatcggtgaaagagttgacgcgcaaccctaagacaggaaggtcggaggtgaggtagtcgtttatcccgttgggcttgtacccaggctcccacgccaggccttctaggtcatctgggtcgctaacaacacagggccgatcttgcggcttcgggattcgagaggccgtcgggtgtaaagcggcaggtatgccatgattgacatgggcgaaggatattggtggtctgccgatcgagaactgggctggaatgtgccattcgatcttacctgtggcctatttggtaacgccaaaagtgttaactagtataaacccgtgggcacttcatatgtttatgcagccctagattttctctttgcagatggcccattcttacattcttcctcagtcttcctcctaacctttgccacccctctcgtttgacgaggccctcaagggattcgcgcaatatttctgggtcgagcactgcataaaacacgagagatacagccatgttattaccctggacaagccaactatcctcgaagaaatggagtggaaccactcgatcgcccggaattggctccatggtgggctgacgccaaaacggcattttcatggtgtgaattgctctatcacgaacagaaaccaggctgcctcaaagaaagattactgcaaaatacttctttgaacaaaagaataatcacatgcattatgcagctggaaacccctattctaagttgcaggcaaaaacatggcgcgggggccatttcgttgttctttgaaggctagatctaatgtgcactatactagtgtcgatctccactcattctacttgagaattgacaagtctcctctcatgatactttttgctagcgtgaaataagtaccatttgtggaggagatagaaaggtatatttgttataggctaaaaaaggatagtctacagcagttagctctggtcgcaggatgagctagggcaaatgagactccacttggattttacgaacctccgatattactggctacagtggtttgctacggttctggatcaactgttgacaatgttttagcccgcgtagcaagaaatttgccaacactggacggggttttatacaatagtatataggggtagaagacctatattgatatagatttaattaactccacaatcagatacaatggatctggatacgaccccaggaataccgccgccagatggccaggaatcacatttccatgaaccctataactcgttgcaaatagggactgtcatcgcctttggcatcacctatctcattgccacggttttcctcgctcttcgctatttccaggctttcaagctgaccaagaagatcgagatagacttgagtaagagaccaacttcttcaacactctgctagacacttattctactcgatagtcactatcacgatttcttatggtgttgcactggtatattttgtgactgtggttaactgcaagtctcccgtgactatctttcgggttaaggtataatctgactcaaatagtaatgaactatggctggggaaagcacatgtggaatgttaacttggaagatctcatggggtttaataaagtaaagacattatttgcataccctagcacattggctaacaagatgcagggtctactcatcaacaccttgacttatttgatatgtccatgcatcaccaagatggccattctatctgtcttatttcaaatcaatcctgcgaagatatatcgttgcctcgtcgtggctgtcgcactggcgatctttgcgtacactctgaccttatgcatcatcaccggaggaccatgtaaccctctccatgcaggaaccacagcctgtctagaaaatgtcgccttatcccaggcagttctgaacattgcctctgatttggcagtgattgccatcccgatcccaacgatacaccgtctccatttttcagagaaacaaaaggtcacggtcggctgtctgctgactttgggatctaggtgcgctttccctcattcttgaattgttctgatgccatgattgccgctaatccccaccccagtgtcgtcatttgctccatagcacgcctaccatacgtcttactcctcggcaaaaccgctgacacaacttataccgaagccatcctaggagtgtggtcccttgtcgaggtcaacctcggtatcatatgcgcctgtgcaatgcggttcaagcgcctaatatcgatatatctaccgcggctttcgctatccccatcgcacacgccccgtactgcgaaactcacagaggacacacctatgaataggttccagcccaaaaatactggagggcaacactcataccagctacacagcatccatgatggaaatcccaatccgttagctggcacgaaagatatctccgtccaccgatcgtttaaggtggatgaagaacgtacatatttgtaccgcagagacaatgatagcactgacaaaattttagcttgagtcacatatatgtcaataacttgtgtatatttatatattttgcttttacatcagtctcatcacctattggtatgcacgatgtagaattctaccgaaatacccgtggttaaaagatctccacgctcatggcttgctgctcttattgggaatgaccatagaaggtcagttcacgtaaatccaagagctgacggcaacctactaaatggacacaacctaacgcagggtgatgactacgacttaatctgcaagatattcgacattccattctcgtcactgtataagtgaaatccaagcatcggtccgttcatgcaacccaaactatatggtctgctctgctaacatcctcctaggctcggattgcactaatctctggatgaacactcctgtgggttaacatatcatgaccatcgaatgattatctttatactccgatggcaatacatcaaaacaagtacaagtagaatatcggggtccagtgcaagtaaaataagtagaaagtaagagatcattcttgatcgaagttaaatttgtgaatataataaaacgcgctatgtccaggagaataatgcgcaaaaaaacaagaaaagataagctccacaagaaaggcagacatgaaaagttaacccaagagggctcattatgtattatctaagacgtagacaagacatatacaccagaagaacccacagccgtaaaaacccgacagcatcgtgtggttttcatcaaagcgataacaccagtcacaatgctatctcttcatgatgccattgacaatcaactgctttacagcaggagagcaacggcaccaaggatggcagccaaaccggcaccagcaccggtagcggcgttcatggcaccggcgttgaaggcgggctgggagggggtaacagcgctggaggggctggagggagcactggaggggctggagggaacgctgggcacgccagtggagccggcggtggggaccagaggggtggaggtgacgacgctggggacgacggggatgaggggagtgctgctgctggccacggggctggaggccaagggagtagagaccacgggagcagagggcgcgggagcagatgccacgggagcagaggccacgggagtagagaccacggcggtggaagagctaagtaatgtgttagattaaattaattggtcacgttggatatagagaaatccttaccaggagttgcactcagtcacggtggaggtcgagatgggacgggtgacagtgtaaggaccgtggctcatggtgatgtagccgggctggaatgctgttagtatgcggcgaagacttgttgctcaggaaaacatacggtggaaatgctgtaggtgtggcttccgtgtacaatagaggtagcctcagggcagtaggtggtgtactcggtgagggtctcggtgacaacaccggccatggcaccagtagcaccgagagcgagagcggcaatagagaaacgcattgtgatatagttgatagagttggaatggttccgaaaatgttccaagatgaggtatgtaaaagaatgacagggattcaaaagaatgtaatcggttgaaaaccggggatttagagaatgcagtggaagaaagagagaggaaagaaggggggggagaagagtttataaccaatcctgtagattaatttaaatgagattcaggtacccgctgccactcacacactgaggaaaaggggcagatagagtggcaataagagagtagcgaaaaataaacaacgaaagtggattggagccacatgggaggtacttaattgtacagccaaattaatacgacggctaaagtcacttcctccctagcgttcctcctcaccttaagcgcacgctccagggaccaggccgtcccttcccatttaggcactgatgggctagcactggcgattgtaatttaatgatccagggtcggagtaacttgaacgtacggagtatatatctatattgtaaatgacttcttattctgtggttatgccaagacctcaaaatagatctccaaaataggcatttggtgtcttgtacggagtctccgtatcctattttgtatgttgtagatatcttttgagtgaccagtcttcaatctccagtagattacgtctaactaattcaatatgtacatagttatctaagtacttccttaaattctaagatcgtacttacatacatcgaagccctaattaactacctaactaggtagaacatacatgagcatcaacacctccccttgctggacagtatagttgttctagccaattgtctattgtgagggtggagtgcaagaggggaatgcgagtcagggtcgtggaaggggctagttaaatcgtgttaagaatagtagcgactatatactgttaaactaattatactcgagagtcactcggagcatacggatcgtacgtcctcgttgtactagagtgtcgacaatgagacagcaaaaaaacattgtcgcgaaggggttcagagatgtggatttagcacagtagatcaatcctgaccttgccttggaggtgaaccaacacaacaattccaatccgataagtactggcccctcaaaggatggttaagaggcgtgggacctttcagcagcgcccgtccagcgccagctagaccgaagtccagccgtcaccgacgagtgctgacacagattaaaacgccgtttcttcatcttggatttagttgtgtgaagaaggaaaggagggaaaagttttgccgggcgaagataaaccaacagccgacgcacggaccaggcggagagctcgaatgggaatagcgcattttcccgctttccgcgggcaacggaaaggtgccagtgctcgtccgacaagcatcagtcgtttaaaagccgtggctttcctatcggctaagtacataataccctgcttgagaattgaccttcttcagcttcatcatgtatttgtctcgctgtggtagatccgctgctcgcttgcttccccttgggagctcccgggcagccgttgtctccgctcgcgcctcgatcgtgcccagattagctcctcaatcgcggggagtagcgtcgtccactcgcgattcgcagcacaaggttggcggccagaatcgattcaatggcaagcggaacatgtagactgactatttgatagctgctcgcggcatccctagaggagtccgaccccaccgtttataacatcctacagcaggtgcgtcatcgttggatatagagctcaccaatcgaacgaccaggtgctaaaactatcacaggagaaaaaccgtcaaaagcacttcattaacctgatcccctcggagaatttcacatcgcaagctgttctcgatgcccttggcagtattatgcaaagtacgtactccgggtggccgcctctgcttgctcgacagactatcctaaccgcaatttagacaaatattccgagggataccccggtgcccgatactatggaggaaacgaatttattgatgcctccgagcggttatgccagcagcgtgccctcgaaaccttccgtctgaacccggaggaatggggagtgaacgttcaacgtatgaaccagttgacgtgatataattaaatatgcgaagactaactcattccagctttgtccggctcacccgctaatctcatggcctactccgccctactcaacacccacgaccgtctcatgggcttagaccttccccacggtggccacctgtcccacggctatcagactcctaccaagaagatctctgctatctccaaatacttcgagaccttcccctaccgcctcgatgagtcgactggcctgatcgactacgatgcattggagaaatcggccaccctataccggcccaagctgattattgcgggtacttcagcctacagccgtttgattgactactcacgcatgcgcgcgatcgccgactccgtgggcgcctacttgctatccgatatggcccatatctcgggtctcgtggctgctgacgtgctcccatctcccttcccctactcagatgtcgtgacgactactacccacaagtctctgcgtggcccgcgtggcgccatgatattctaccgcaaaggcgtgcgcagcaccgacaagaagggcaaccccatcatgtacgatctcgagaaccccatcaacgcatccgtcttcccgggccaccagggtggccctcacaatcacacgatcaccgcgttggccgtggctctcaagcaggctcagacgcccgacttcaaggcctaccagcagacagtgcttcttaatgcctctgctctagccgatcgcctaggtgattctaccagcaacggtggactcggctacaacattgtgtccggtggcaccgataaccacttggtgctgctggacctgaagaaccgcggtgtggacggtgctcgcgtcgagcgcgttctcgagttgtgcggtgtcgccagtaataagaacacagtgcccggtgacaagtccgccctcaagcccggcggtctgcgtctgggaaccccagccatgacctcccgtggcttccaacccgaggacttcacccgcgtcgccgatatcgtcgatcgcgcggtaaccatcacccagaagttggacaaggctgcccgtgagtcagctcagtcccgcggtgtcaagaaccctaataccgttaaggccttcttggagtacgtgggtgggggtgaggagatctcggagattgttgttcttcgtcaagaggtcgaggactgggttggtacctttagcttgccgtgggctgatgaccagtagacgttttcttttttttgattccctctgtatatctccttgcatgatttcgaaacgaatatgattgaagactttttatttcatttaagactagaaatgaacaagtgtaagaatcaagtttcctggtggaatatatatagtgtggactttactccgcaaagtctaattcgagacggaaaccggggaacggtgtcatcattttattttctgctgcatcggggtacgatatactgctctttatttcttcatctacagcaagacttcccacctacaatcatgaaagtcagccaggtaagaacacggaattacgttgaagacggaaatcaaaatactaacccattgtcagctctatgtctaccctattaaatccctccgaccaacaacaatcacagagggattgttcacggcacgcggctttcaatatgaccgccacttcatgctcctcaaagtcatcccaaccgaggatggctccggcaccacagccttgaaaaacatgcatatcccgcacttcccagagatggccctcttccacaccgatatcgagtatccgcagacagaaaaggacagcgggaaactaattataacataccaccctcctctgtcggactcagctcccaaaccccgcgaaatcacccgactagaaatcccactccagcccaatccgaaaaggctcagccctgtcaaggtcgtaatgcaccagagcccaacaacaggatacaacatgggcgcagactataacgactggtttagcgcctgcttcgggtaccccgtagttttagcctacattggatcgcattcgagagaggtgcttggcacactcgcgccagcacagcaagacaaaaagacggcgctgggcacaatacgcaaaagcctaaccagacccgacaggaaatgggaacggtttctcccgattttcattgtagcatccgcgatcaacatccttcttcagagcggtactctcgttcgcgacgggacaactccccaagcagctcgcagtctgacgcccacgctccttttcactgctagtgtggtggtgctagtgctacatcacttctgcactctgcatgcgcagcacgagaaccgcattaccttcgccgactgcgccccttatctggtcatttccgagacatccgtggataatgtctcagcgcggctgccggacggggaaattatggaccgcacgaagttccggcctaatatcgttgtttcgggggctgcggaggctttcgaagaggacttttggcgtgcgctgaccgtgggcgctggatcagggcgtggggcgactaggctgttgctaacggggaattgtgtacgctgtcaaagccttaatgttgattacgagactgggaagatggggactggtgagtctggtgctgtgcttaagaagttgatgaaggatcgcagggtagattctggggcgaagtttagtcccgtctttggtaggtatgctttcttggagccaaagggcaaggggattattctgagggttggggatgaggttacggttgccgagaagggaactaggaggtctattactggtgagtgtttctgcttttttccaagcaaattatgagagtgaacgctgatttactgggttctgtagattggcctggcctgacaaattgaaaatagatacatttctctttcggttgtacatcgacacggacatctcggtattgtgtagatagatatccggggaattgacgtcatggtggaggttggaattgcactatgtatacagatttcgggcctttctttatcctctgacttgtccaagtcttgatgatgaaacaatacagactctttttatattcttatgcatcaaactacatcgtaggtgagtcccgagtgagaagcataagaaatcaatttaattgggggataaacacacagccacaattacatcatacccgggcaccgccaccagttgccccaattagtcacctgactgtcttggtccatggaaaggcaactaaatgtggacttggattcggtttctaagaataacttgcaataactttgaacccccgtttcttcttcgtttgccgattctattcagtgacttgtgcgactcatcttatacattgcgttgtggtcaagctagtccagccttaccgaactattcagggactgtggctcaagcccctccaatcatcacgcatacgccgctgcctatttggagtccactttaaattgcgactctcacattgacctgtcacgcacccaaccagagctgcattcgacttgtgtgtttcacctgcgtgacgcttctaccccgcgcttctacctcacgcttctacctctttccaaaacgccaattatcccgcgatccggtgcatagttgaggaaggtatcgctgagccccgccgcgggtaagctggcgcagcagaaaaaaaaagcgatcgcaatcgttccaaaacataattgttataatccccatggatccagccaatctgcgccgcaaggacaccaccaagggtcctccgctgcggattctgtcgctaggttagtattatctctcttcccggcgtacatcagactcagctgacctgaacagatggcggtggtgttcgtggctactccatgcttattctccttcaggaactcatgtaccgcacttatgttgaatgcgaaggcaagcctccgcgtcgcgaccagattcccaaaccttgtgatcacttcgacttgattgcaggtaccggcactggcggcttgattgcgctgatgctcggtcgcctccgcctggatctcgagacttgcaaggaggtatatgtgcgtatgacccgcaaagtatttgagaccgacaaaaccatcgctggtattccctatcgctcgactttgttcaaggcctcgaagctcgaggaggcgatccgcgaatgtgtgcgggaacataccgtgttcgaggcggagggaaacgacacggggaatgggccgaatcatgattctatggcttctatggcaagcttaccatacagcccagcctctattccgcaacgctctatcagtcgggccagtttcagcaccgctgctgcttcgcatccaatgtccccgacaagccaaagaggctccgtttttcttaatgggttgcgttggggtaatccagacgcactgctctatgataatcgagaaaatcggacaaaaacgtgagttctacaatgcgaagacatgtgtcgctggtactaatatgaaatatagcgcggtcactgctatgtacaagggcaccccgcgcaagggatcggctgtccttctccgatcatacgactcccgcagagaacctccgcctgaatttgactgcactatctggcaagcgggacgcgcgacatccgcgacagggcttgctttcaaacctatccagattggtcaaaatcattttattgacgagggtcatggcacattcaaccccgcaccgcaggtacttgatgaagctgtcatgaatgagtggccaggtcgggaagttggggtctttatcagcgtggggactggaaagcgcccacctggtaccaataaccgacaacatgaatggtgggaggatttcttcggcgactcattgggcacatttgctgaagcgcggcgtcgactaatgacgaagattgagggctgcgagggaatccacaatgatatgattcgagaccgtctcgccaaacgcaatgtcagcaaagacaattatttccgcctcaacgtcgaggttggcgttggcgaatttggtatgaacgaatggaaccggctagccgatatcagcaccaatacacgacagtatctggccaggcccgaagtcaagaagatgattttagatgcaggtgtgagatttgctaagatcgatcggatgaaccgccgtctggcaagccatgccgcagctggcggggatcgcgacgacttatcttttgatcttgagactgaagagctttctttttctcctcccattcaatcacatgttccgccccctgcgcacttcgctgtcgaactacctgcggagctacctgcggagtttcttaaccgcgcacatcaccctacaccttcacaagcgccgccacccatcccaaccgtagtgactacatcaccaacggatagcacgctcccggctcacccaacacctcaggataatatatctatttcctcgcctcggcaatctggcagtgattatcgtcgaagccacgagctttcaagccgaccaagctcgcaacaacagagcttgccctcccacagtgatgattattctacaaccttcaatggcatggcaccaccggtgccgccgaagacgcctatcccatacccagctcaagaagatggcggcggcgtgtctatgcccgcgccgctattctcccaagcacctttctctacctctacctcgaatatcaaagtccgacctccctacccagttgatgagccaccaccaacggtgaaccggcaacgcaagcccagctaccacgtacggtgatcccttctcacctgctttcatctcgataccttttttttcaattctttacatgtgcattacgttgtttttgtgtctttcctgctgaatacccctctgttgagacggttgattaaggctgagagggcgtctgggggcatgtaattctatttatggggtttttattttagttgacccactgcgaaagatggccagtgctggcctcgctcgggcataatgaatgatgacatttatgaagattcaaatgtgggaattgatagtctgtatacatacctgtgaggggaaaaagaaccagcatggcactctcatctacatagacatccactacgatataggtacttgattctccgtaaagacaggtgacttgtcccttaataatgtatatgctagcgtatattgttcagaggactccataaactactgcaagcaatataagccgacgtccaaaggtaccggtacctgccgatcgcagcacaagcctcgtcgctagaagtaccggtacctcctttccccacacagccccccagccatctcgatccctttccctctcctcttccccttccccttttctttattattttctttaatgtaatttttttctccattcttctctgattctctgattctttgtctgaaatagattccactttcttgataccctcaaaatccgaactttgtcaagtgctagagtcatagcgccaacggctgaaattcccccttgcggaatcccacctttttccttccctcgtggacattttccagaagcattcccagatcgccgttctaaatcgcagttattcccctattacaaaggtcgttgcgatcccgcgactcggaatcgttgttgacgtccctcgttgatagtcgccccggcgatacgcccagtctttatcgatatcgcggcagcaccactaagtgtttcaaatagtcgctgggtctcgtcttcggacgactctctgtccccgtctcttcccactgctggtcagtgtggttttaatctccagtctccacaatcatggatcccaattccgccttgtcacatgcaaacaacctgctcgcgcgcgcagaatcttcaggccgcccaccagtgtacaaggccgtcggtgtatcgctagctgtcgcatcgggcgtcttcatcggtatctcgttcgtggtaaagaaaatcgggctgttgaaggcgaacgtgaagtacaatgaggaggccggcgagggatatggatatctgaagaacttctggtggtggactggcatgacgctgatgattgttggagagatctgcaattttgtggcgtatgcgttcgtcgatgcgattttggttacgccgcttggtgcgctctcggttgtgattacgacgattctgtcggcgattttcctcaaggaacggcttagtttcgtggggaaggttggctgtttctgttgcatcattggatccgtgacgattgctatgaatgcgcctgagcagtcctccgtcaaggatattcagggcatgcagcattttgttattcagcctgggtttctggtctatgctggcttgataattattggggctgcttttacggctctttgggttggtccacgctatggaaagtcgagcatgtttgtttatatcggtatttgcagcatggttggtgggttgagtgttgtggctacccagggcttggggtctgctattcttgctcagattaatggcgaggagcagttcaagcattggttcctctatgtcttatttgtgtttgttattgggacactgctgactgagattatttatctcaatgtacgtcttcactcttctcgtgtctcatggctatgtactaacccagctatacagaaagcgctgaatcttttcaatgccgctctggtcactccgacttactatgtgctattcactagcgctaccattattacttccgccattttgttccagggtttcaagggcacgggaatccagattgcaactgtgatcattgggttcttacaaatttgtgccggtgtggtattgctgcagctatccaagtccgctaaggacgttcctgatgctgctattttcaagggcgatctagatcagattcgggaggttgccgaggtagaagagcccgagtttgagcccaaagcggactccattcgcggtgcggcctctatcattcgtcgcatttcaactgctcgccgcactatggaatcggatgaagcccgccgtttctttcatgataagcatgaagataccctgacagtgccaggcgagaatgagataattgaatgggatggcctacgccggcgcaagactgttattggcgagggaccgactatgtcacgaccaatcactccgcgaacaccctcggtcaaacaacaacatcctccgtggggcatgtcccgattgcccgctgcggagcatgaggacgaccaccgacctaacaccaagcaaagcggtcattcttttatggataacattcgatctcgggcaactagcgtgcttcatcattcccaatggaagcctgtaaatacagaagacgagaaaggttctaacgccaacacccaatcgatgggaatgacagacatggcacaccaaagtggcaatgttgacaccgaataccatggtgccggtatggctggaggtgtggaggctgtgttcaacgcaaaccgtccacgtagcgatacgccgcggtctatatcatgggcagacgaaaagcccgaatcactagcaccggaacctcttgccaccactacccgccgccaattttctttcaacaacatgatgggccgtatgaagaccgacagcgaatcttccgtcaaacccacaccaggttcgcccccccgtggcatcctacgccgaacgcacctggcacccgatctgcgcaaggacgcaactgaggaagaatcactcggcctcgtccacggcgactcacgccgttctcaaccagaggaagagcccctgaacgaaaagctagaccgttggtcgagcgccgagtcagaacttgacgaaccccagcccatattcacaggtcggtcacacggcaactccgtgtctagcaacatgtccaccgccgcattccccgcctatgaggataaccaccaccactactccgagtccaacaacccctactatctcccgcacaaccgacaaactacctcatccccagaacccctctcccatgaagaagagggatggaaacaccattcatcgagggggagcagcagtaggactcgcacacggacaacctcttctgttcatgtgcattctcacgccccaccccccgcccaatcctccttctctacccaccgccatccaaaccccttgccgccactccctgatatcacacccaccaccaccctcgatctcaggcccatcgcaactaattcgtcggcattgagatcagtctcttcggaatcagatatggtaacaaccctctctagcgaaacgggagacctcaacgatcacccccttggctacctcgcgcgccaacagagcggctggcgtcggcatatgtctgaaaacagcagccatgatggcgagacgtatgccacgcgcggaggtagaggaagttcgttcaggtgaatgagaaacttgcaatctttctggcttatatagccatcctggattccagtttatggcgcacatatcctgttttctttccctatagtattttgcatggctatggcgtttattgagagattttgttgatatgtcttttcttttctgttttttaactgatttttgtcctgtggtcgaacctggttttgtcaaaccagtctgtacatgtacggtgattgtgattgtgatcttgtatataatggatgttatgataatggtgcatgatattaatgaaatgagaacctcaagtgtcaagccgagagtagagtactgcataagtcgtatcagcaacggtggcacattagtcaattgaacgagagaaatttcaaagcagacgtttcatattcatgacgatcagatcagattcgatgtgatcatagatcattgggtatcctaagtgcacgtggttggaatgctcataatcccaagccggaaaattgacggaaaatcatggctctatccaaaacgccatatgctatgcaaaaaagaagaaagtcgctaaatgccaaccataaccatgtaaaagaagatcacttcttcggctcctgcgcaccaaacatcccagcaacactccgctgccccttggcggcaacatgcatactagggaaccgggactcggcaagacgacgcccagctttgatactctcgagagccctagtgataaaaggttcaacatcagaaagggtcacttgccggtcttcaacagcatcaggatagtacataccagtccacactgacaaccttcacgcctttccaccccccacgggcaatttcctgctggagcttgcccgccgcaaggcctccccctgcaccagatacatccattccactcccagccccagtattgggctgtccgacaagaacatgcgtcaccgtcttccgggccatgtaaatagaagtcttagccccgttcgacgctagtaaatgtttgagtttgtactccgaaattcgaggaagtgtggagccattgatgaataccgtaacaccagcgaagatacgcgaagtcgactttaaatcaagactggcgctagagtgggactcgggttgggggttgccatctatttgagattctctctttttcatttcccttgcatctcgagctggagtcaacccccggttccctccaacagtcctaagtctcttcgtctccacatcggtatgctgctcgggctcatccacaaccttcctcttgctaacacccataaacgaccggatgtcccgaacaccgagttcgttccgctttgccacatccccagctaccatagcccactcaccggaagcagggactttgggcggcgagtgcggcgcgcattgcccatcgaacaccccgggtacaagcgttgactctcgtgtttctgtattccgaaggcccgatcccgatccccttccccgtcctggaagacaatccccactattatactgcctggtcaatttcgccgaacgcgcatctcgccatgatgttgaaccgaggaaaccgccgccgtcggctgcatgctggtgacccgttgaggctgactgccaggagtcgaaatagaggtggttttggggtcctgggggttgtggttttgcggctcgttctgatcggtcgctggtcatagttggatcttgcaattttgcgggtttgtggcgagggtctctattcgaattttgagggtgacgttggccgggatgaggtgttctgggatgtcgttatgcttgagttgaaatttggcgagaagtcgccgtggcgtcaaacggaaagaaccatggttcgcatgttttgattttgctgttttgggatagatagggtagatttagtcacgtggtgtgaggtatgcgagtacaatgagccatatacaatttatagactctatttgacggtttccttggagatacacactggcactaagctgaagcttgagaacaagtctcaaggatgaagtaagataaccgaagctgccatgaagaaagcctaagtatctaatagctatgaatgcccccgatgatctatagcgtcaagtcgtaacggtcaagttcaatagctcaataagcgaagcaaggcccagcagactacaatttacaattacatctacaagctgtaaggcgagagaagtcggaaaaaacaatccatttagaccggacaaaaccaacgttgtatgtcgctaaaggcatgcagacccagagttcataaccgttcattaccatgataatcatctctctagtagagtggcagtggcagaagcagaagcaacagcagcgcagagagtagagaggggagtaaaaccaatgccaatgccatgccacaaagaatacccttttcaaaccccagaacacgcatcaatgataaaaagaaaagaaaacaagagaaaaacaactcgttaatgaagatggctcgtcgtggtcaagtcatcacacaaagaaaattcgttcataagagattcgtcacatcgtagtcatcgaggtttgcgatcactatccaagtcttcaacaagtggcaagtcttttaaccacggaagtatcaagaaatgcgtcgctaatgttgtaccgtgaacagatcttgcgcctaattcttcccctctcccccacacaagttagatattctcaaaaaaaagccaaggtttcttcaacctaaaacataacgcaaagagacaaatgagcttcgtttcgtttcgacaccgccgggtctaccgatatccacgtattcgtagtgagacacagacaagaccgcggcgcgccatgcgggttgtgcatgcgtagtctatcgtgaaaaacaaactccgaccgagaaattaaccatcagtaaaaaaaaaaaaaaagaataatccagcaagagccaaacaaaacccgaagagaaccggaacaaaaaaccacaagctcgaagctagctagaagctacaattgaattgcacgccctcagcggtgacgagccatgaccccactaggcttcatgggctgaagaataggcgggccaccgaccggacctccgagggtagaatcggtgatggtcttgcggcgctttgaggtctcatactcggcagtactctcggggcggatatcgtcgtcctcgcgcatgcgcttgctgcccgcactcagcgaaccattgccagatgcgtagaccggagccgtggtcgaggccatggagtaggggtccgacgcaccggtggctggggtaccgcgagtatcgctgacagcgttgtacagggtagtggcggcgggacgaggaggggtgttgtagcccgaagcccagtgaggaggggggccggctcccgtgcgcggagtcatgcggccggagccgttctgctggctcggggagctggtcatctccggggtgagctgggagtgctcaccggtcagggagctgacggaggggtttgtggtgtaggtgtaggagctgcggttggagttgtagccggcgttgggatcttgcatgtactcctggtcatgctcggcgacagtctcaccgggtccattgctctggctgtagcggtttgtgtcgcgctcagaggtttcgggctctgaggcgccgggccgtgggtttggtggcgccatctcgcttttcatgtacccgccgggcaggggttggccgtagttggacatccctgattgagtcaatggggtgtgcggcgcgtattgggcatgagtttgtggtgccgcggagtagtagggcttggagctgtcgtagccttggctttggtaagctggcaagccttgcatgttgttgcccggtggggtggttgcgggggtggttggcattgagcgctggttgctcagcgcggtgtcgatggacaggggttgtgtatgtggcacttgtccgccccattcgtatgaaccttgatggctgacgcccatcagactggatgcgctagctggcggtgtggggaatgtgttggcacgttcgagatttggtctggagccgggctggccgtttattggaccttgggacatatgagaagacatgggggtctgcagggaggggtggtgatggtgaatcggggtttgctgagatccagatggcgtacgctggggacccggaggtggaccttccagacgtcgctgctgggactcttgcactaccatatttgtccgagtctggttagccgggtggtatagaagaccaccaatattatgcacgaagagtgggtataggagatcagtgatcttctccttgttggcaaattctagagcacgctcaaatgggatcctgaagaataaaagtcagccgatgttgcgcatgctctccggggtcaaaatacataccagacacctttcaaatgcatcggtccgattttcacaacatgacggagcttctcgcttttgaggattccatcacgtcgaccacgggtcatgccagctacatttagcagctttgtgccattgaccatgtggttatctgcgggagaaacgttagcaaacatatcctcggttgaccttccagcagaatcaacttaccctcgcgtcgagccacgcacactccctttgcttcgacctggtagcagaggcttccctcatcttcccataatgttgctgtcactcgcggcttcgctcccggaggagcaacttgcccagtaccatcaaagacaaacccttgtagcggagcaccagtagtgtttgcatagccactcggaggtgccacggggtgattgctcacttggtaacgatcagaataatcatccatcccactctggctttggagcttaccaggtaagggcagcaactggctctgcatctggccacccatcgaggttggcgggtgtcccgcgggtgaagaaacgcccggggcgtacccatattgggggtaagcagccggggcgtaagaagacgcgggctgcatcaccgggggttgcccgtggtactgatagtgggacatagcccctgcggttgcgccttgaggagcgtaggactgagcagaggacatgtgcgagtggacatccatgtacgactgggtctggttcatgctgccgagggaagttgggctgggatagtacccttcgttgaccgaatgtgggagactgtattcggttgcggatgaatctaatgaaagccggccctggttcccagacaggtccgcagaggacgggctcctgggttcgttggtaggcacagaggcaccagacagactcgtgcgagcgctagaggtggtggaattggtcgcggacgaatcgtgataggcggtccgagagaggccctgggtggctgttggcaggctgagagcggggagtttgtcgccgggcaataacggtcgttccgccgcgtggtggttgtaccaggggatgtcagcaggaccgcgggtatggacctgcgagatcgatggcagctccagcttttcggttgcacggataaacggtttagaaaaatggagggatgaagcgagcagcggacgtcgtaaatgtcgtccggcgtgctatcaatataggccgcagaatcgttggaagaccacagagcttgcgaacgtcgcacgaaggggaaaataaaaatagtaaataataaagagaaagagttgcaaacgcaatattcaacgggctttcaggatcaaacgtcccaaaaatagagaatttttatagcaagtgatgcaagatgcaggcaatgcacgtccaatattcgtagtgaagcttcgtagtaagtcgtaaaccttttgtcaagactcgggaagcctagacagaagcgcaataaggactttttcttgaaaagcagaattcagcgagaagcacaatggtcatcagaatcattaacaatcatcaatcgaacacatcaaagttgggaagcttcagtggaactagacagaaaggcgtaagtttggaggtcgtttcaaggtcatgcagggaatcatgtcatagaagaagaaactctcaaattggagcgcattggatgataaaataaggccaaagccggataaaggtagggggagggagagttcaaagtcttagacagtcgagggatgggggggttgagaagagaagaagtgcgttcgacgtacagaaaggtggaggctggggtggtgcagcaaacgcatccctatgcaggctggatagatggcgtttgaggaaaaagaaaaaaaagtaaaaacaaaacaggccaaacagatatatagcaagtaaaaatagaaatcaagggcaaaagggcgggcaatgggggaaaatgcaagcaggaaatcgtacagtgaaacttagcccagcggttaagagaggggaaaagaggtgaagcaaaatgacgctgagccgcagcgggaaagtcgatcagtggaggataagaagaagctgactaaggcaggcccaagagaagaaagagaagaatgttgtctgcagaaatcccggcttgccccgtcttttgagggagagacgaagaagagaaaaacggaaagcgaggagagagagaggccatcgaatcaatcacagtggacccggtagagagagagagagagaggactaccagaaccgtgcgtttagatcatcctctagactcgatatctgctgtttttctttttcttttctttcttttctttcttttcgcttttctctttttctctttttttcgtgattatccgattttcctttttggaattattccattattttcgacgccaccaagtaaggaccgtgatcagcaagcgttaagcggcgaggtcaatcattcccattctgaacggaccagtattaacgagcatttcccgattcggaccagacctagactgcagggacaagtccaagagaaatcctcccagaggatcctggtctgtgtgacaggcagataaatcaacacgatcggccgggataggcccgctggatctgggagttgattcccttagtggagtcaccgatcagattcaattaatttattgcttttcttgagagggttactcgagactctactattgctggggcggactgcaggatagaacaatagacggacgagctaaccatcccctctacacaccacccaaaaagccctcaaacggttcctatcatccaataaataacacctcagaaataccacctgagacggttcgtctccacgcgcgcgggtcccacccagtgaaccatgggcggtcgaccggggagtaggaacggggggaatacatcccacggtttaggctgaggttaatggctgaaaccacggttgagataccaccgtccacttcatcctacgacatctggtagtcgcacatcggtactatatcgtgcataccgatgatccaaattgaaatctcgtcccgactgctctttcatcgtgcaagacatctgtcagccgctgcggagaggggaaagtaaaaaaaaagaaagaaagacccggtaatgcgcggcggctgcaccgtcgattgcggattgcactctcccgcttctggagccagcgcttgcaccatttcccctctatttggggtacagatgatacaggctaatacctgcaaggtccatcttaaagaaacggttaaattccgtcccacaaaacccttcaccggacatcgcccgggcctcccctctcggatatgtcactgttagaggtggtcgtcgatcgccccgggtcaagtccggtcaaaggccatgtgtggttgtagccgatttggcccactacaatcctattgcaatccctaagccaagcacaatataataccaaggccttggttgtgttcttctttttatggttcgggacgatctaggcgttaagacgggccgtgagtaacagtggagagacaaagaggaaagaagcacgtcacaccccccgggatgcagaggggagaatcagtggctcagaaggaaccacgaaacacgggtggcttgaagtcaatcaagggtctgttctctcttcccaatccctgccaagtaccacgaagaccagtcagaggctaggcgtttaccgaaactgcaggcgatccccggccggttgaagagaaatgggaaatgggaaattagaaatagaggtcaaaggcaaatagaaaatagaaaatagataatagataatagaacaaaaaagaatcggattgagtccagaatctgtccaaccacccaatttcagcccgaattgaaataggcccttcacacgtagcatcacaatgtcaactgagagacctcgtgatgatgtatccgactctttcttttcgcctccaaggttatcgggggatcgtattgaggctggaatgattcatcagcctatctatgtacacatgaatgattatgttcctgatagtatagccggataatagttctaggcaaaataatagcaaataacatatttgttttgatcgaatttatttttccttacatttttcccccaacaaaaaccgaaaagcctagagccagatcccagtaaggggggaagatcagagagacgctgaacatcaagccaactcgaccccagttcaccgctaatttcgtccagagaggccaaagtccccttgcgttttggcctttttattttcatttattacttggatggtacttattctccactaataggaactaatagactaaactattcacggacttgatttctaacctgatagtctcggctctgggttgacagatgtcaattcccacgctttcccaaaaaaaaaaaataagaaaaaaataaataaaaaaatgacagctagggattcgcccggttgctattttctcagtcctaccctaatatgcattgaccactgtacatggacctagattcaatggttaatttctgagatttcggggagatcatgatcggaatatgatttccaaatatcaaattattttgtactttgcattctctagcgggttctgcaggtggcgccgatgacattgtcccgccacacagacccttgagaggtcggtgaacatggggccgggaaaatacgggcctaactctagaccaggttacggagtagatatacttgcttggatatatttcaaggccaactagtctcatgctagaacttccaaacgggtaggaataccgattttcttgcagacgttatgacatacacggaagcaggtactacccaccctcgcacactaggcccagagagctccgggaaatttacagaaagagaaagtgagaggggccagtactgacagatccctgcactgcagctcgctatcgacggcccgatacccgctgcacatacagcatacagtagtttaggggggcagcatgggggagggatccgcctgaatcgacacatatctttactggaaaaggaaatagccttccgtgccggaggatttgggggctgaatgctcaatggtattgaaaggaggctagagtggaccactgattcatgactttgcttctttgcttagcccttgtgttattattctgtcagtctctccccgacaggaatggaaaaaatggagagccgaattaatcaaaatcagctcaaatgagatccactatacggagtatacggagtacccacagccattggaacggcaactccgcaattcggctgtgatgcatcgtatgggaccgttgagccgaaaatgtaaggagatgatcagttcttatgataggtacacttagtagtatttgagatataatgtcaatcctttacggagtaccctagagagtagacagcaaatactcgactatcaaatatattccatgtgtccattcttttccactgatcgtccctccggggttttccgactatcaacactggtggatctctagggttagaggtcacatacggagactagagaatccttccaacattattagcatttatccataaactctcccatagctagatcctccacttcactgtttacgccgtcaatctcgcgtcgatcgacgggttcgtccgtaccttgcagcgagttaccctgcagactcttgtccgtgcagatttcaggcttttttcgtgaaaacggaccacagacttcgaatttaaatattcttttttttctacaatgtgcactattatcatgtttatatacggggctttttggttcctcttctgcccttccggtctataatatttcaggggctgccatgttttcccatgctatactccgtacctcacacatcaaaagaggcagaatatgcccgaagccgtctgggcagacgttcatgcccgataaggccatcagactgatgatcgcggacacacacaatgggtacaaggcctttgagaggcatgtgtggtacagcataattacggagtacgattgtatagcgggagactcggacacgaggaagatttgaccgagagccgatgacttacagggatgttccctgcagactattgatgtgttgtacaggacggggcaaatgaaaaggcgaatcgaccgagatagcctccgtatactccgtagccccgtagccccgtctgctataggtccacggtaaccagaggtacttgcccaagtaggtataggcgtggacatgatagtgaggtacatgtaccctgaaacaatatttgaattgtgactctgcttttcatgtgactggagtaatttcctggagccagaacgccacccacttccctcgcgcgaataacaatgcaccacgaagccaggatctggcgtgatggaactaggctggggccgtgcaaccttggatttaacctcgcattgcattgtcccgtggagccaagagatcgactgcacgttcatcttgcctttgcactctagcgcttcttgtgtcgcaagagaggggggaaggaggagagataggtctaacaagaatcgactagaaaaccgccgtggattagggattttgtacgtcggaccatttagtgatcataaccccctgagtggaatcgtccaatccagaagaaaatccaaaggtcttgaataattcaaccgccgtaaccgttgacaagcgccggtattttcgagtcatttattcgcttttttttttctcccgtgaccatagtggtagtccagaacaatatcacctggaatccctcatatctccgaaatagccaggatggctcgggccaaatgtgtaacgagactaaaaccccatccaagccagcggcgccaatgattggcttcacgtaccagcagcccgccgatcgatgacccgacccaacaatgactggctacggcaataaccacgtaggcagggctagatcgtgtggattcaccgccagttgccccccttgcgtgcagacgtggcacagagcattatctcatagtccgtacggagtagctccatctggtatgcagtgacccgctgctgtggaggcctaatgttggatgtatgtcgaccgttgtctgctttgtgtatggcttattatcccctatagagtacgaagtacgccgtgtaggtgagacaaatatcaaaaattcaagatgtgaatttttttccaaacgggaaatatcctcaacaacgccgatatcgggctattttgggccgatcggcgcaacgtcagagggcagataaggaaacattaaaacaagtgaacttcgatgtacgacatagtcaaaatatgccactcttgtgagatatgaacttgtttactatgttgtacaaaatgtacaacagcacttagattcacctgttcagaaagggagtcttaccagcttctgcactaccacatctcagccctttgtacatgtcaaaggagacataagcataattatagatcgtgaaccattctacacagtccatgtgatactagcactatattcaaaataagcaattcttccctaggttgctgtgtcatccctgataatgacaatgattaggcaataatcacgctaagcctagaacagggagaccccggactagaacaccaggcctaatcccaatagacagataggcaagagccagagcaaaaatccaaataagcccaaaagaggaatgaaaagaccgctcaccgtctctttgctgtctcagctcacattttatagtatgtactgtgcatctgacaccaaaacacgcgccgtccacgcttctatctccccggggaggcgtcgctagtcgatcgaagaatgcaaataccatgcagcgtgcagcccaagctggaagtatcatgtacgatgaagcagagccagagtgacaagctagctgccaagtgccagcgcaggcggctaaaagcaagtgcaagtgtaagccacccacggactgggttgctgtgcatgaaatgatgtacatagttaatcgagcctagcctaactactataaatgggtgggtgtgaatcatgtccagatcggaggttggcgcgcgtgggggtttccacattctcgaagcatgtctgccattgatattgtgcatggagcgcatgagggtggtgtgggtggatgttgcatatcgtgtcttgggtgtgtctgagatttgttgaatttgtttcgtattttgcttttttttttctttttggaggaaagggaaatttgctctggttggtacgggttgaggaatatctgggggggggtggggatgaattgggcatggggttggcagttcgcttgcaggaaacttctaaggttcttacctgggtgttcagacctcacgacttcgtagaggtacgtattcaccgctggttgaggacctgcatcgactgcaagtctctcgtgtctgtcaagggatagttcgtgtttgtgggagctggtattggcggtgggaggttggtatatcccttgattggaaattggattgttgctgcttgtattcgtagaccgattgtttcccgtgggaaaaatgcgggaataagtttgaaagatctggtctcgaccttttgctgggagggttggtagaagtcttgttctatgcttatgcagcaccgatctcgatctgataggggttgttgcgatgataatgcaatcgcttacgcacagcggatcaatgctgatagtgtcggtgcgtcgactcgaggggacgggcatttctgcagtgttctgtgctatgtactccgtagacctgaacgcgcttctagaaggcgtggttggtgcagtatgctgtcttccgttgttcatgtagggatgctacggttcctgctgatagatcgccgggatcatatctgtattgcctcaatacgatatataagtcaagctgtgcgcggttgagccttaaacttcgatcaaaaggaatgatcagatatcggtattgggtcccgtagctctttcttttttttttccttgctctagaagacatagaagatcttcaacataacccatagaagacatcataaaagacaatatagaagatgacttgaacgtgtcaacaacaatggacactacggagtagacgtggcctatatttgcccggaagacgccattcattagccgatggcaatccgtaattttattcgatatgaaatgtagaagaaaagccgaatcatacattataccttatagcgtcgggtcaatggatgtttagacatgattcgagggatatgtcttgagatgtgtgtccccaatatatatcccctcctcaaggtagaactacgagtggcatacattaaaatggaaaaaatctccaacaaaagacatatacattcactacagaagaaaggagcattatttgaacgaaaaaagagtgtttgtccattgaagtaactctaaagctaacaatatcccgacaaagttctatacccgacccaaccatattcatcatgttttttttacatgcatatctcatgaaacgcggatagcataatcacacatcagggctggtaaattcatcgcttaccagcctgagaaaaaatctgttgccaaatgtcgatccattgctgatgcttatatgacaacggacggtgggggttgcggaaagtgatcgaaagaatctcgcgcaggcggctattcaggatcctcaaagctagcatagacttccaatctcgcacagcgaatcggatacggtttgcgtcaatggagacgacaccagaatacatctgtttggcggtggttagcttattgcctaagaaatggggcaaggaaacgcgaagaaggattgctgtcgtcgtaccttgaactcggcatcaccacacagtaaagctatagcaaaatcgtccactgcactggtatcgtgcgcgttgaggttgcgagcacgtgccatgatgctatagtatgacagccatttgacagacgaatccgccctcttgttgacagaaacagcgggcagtgtgactgtctggttgttgccaacgttgcgccagcccttgccttcgcgcgtcagaagcttagggtagaaactccaggcgatgaccgaattgatcacagtatcattgttgctgttgatgtcgaaatcttcagggatgatgaagaattggcgatttcggctgttggaacgtgcactttgggtagggttggttagcaattgttaggttgaaatgtgacgtttggacaaaagaatctcttaccggttgagggccgctttctgtgatgcatctagggtcagaagacctgcatcggcaattgacactaccaattgcatcttgatatcctctatggccagtaatgtctgcgcgctgaggaagttctttcggcagaaagaatattcgttggaccccggtgtgcttcttgtgcgcctccaactacaataggcgttgtatacggtcaagagatccgagtcacctagtatttgttagttctcaactgcgggagagcgatatattgggacagacctcttcggaaagatgcccgagcaccatcacgttgtgagttagatccgattgtgttgacgaatggcgacttggaagagaggatagcagcaatgctgacagtcgcatccaagcaccggaaaaaggctccatgaatgatcattttgccgaggaagacatccagcggcaacttggcgagttgtgttccgagagaggttaaactctcgttgctcgtcagggccttgacttccttcagtgaatcaatggcgcggcgaatgtttttagacgacggcgggtcaagagcttcgaggagtgtctgttccacttctcccagtttgcagatcttgacacgaagcactaaatcctgcaaagaaaggcgcagcaattcgggggtttgctgttcagaaagcaacttttcgtggcggtgtttagtaaacaggtggaagcagataccgttctggacacgtccagcacggccgcgacgctgcttagcgttcgcacgcgagatgaatgactcaacaaggcgggataattgacgtctctcatcgaagcgcatgatcttctcctttcctgcgtcgaccacagccgtaatatctgggatggtgatacctgtttccgcaatgttcgtcgcaataacaatttttcttgtgccttccgggggtacgttgaaggccttttcttggtcttcactggcaatcgaagagtgaagtgtatggacgatccaacccctctggaacatgggctcagacaggatctcatcgttcaggcgacggatttctgccagtccaggcatgaagatcaagatcgccttgctgtagtgagtcatctctggggccgtagcaatcttcagaagtaacctcttgattaggtcatagtctagtctgtattcatcgatgttgataacagtctccttggtttgtctagaatacccatcaagactggcttggagacctcctgtggtgtcggcatctgtgggtgggtcatccatatcatcgtcgaggactgtgtgctgggcatcctccgacaaacggtagttggtcatctcgaccgcatcctccaggtacttcatctccacggggaatgttcgccctggaatgttcagaactggcaccccaccgagatagttcgaaaaacgttgcgcatcaagggtggctgacatgaggatgagttttaggtcaggccgcttctgcatgagtcgtcggagcacgatcagaaggaagtcactgtcgatagtgcgctcgtgaacttcgtcaagaaccacatgagtgatgtcttggaagtcatcgggccgttcgagcattcgtacaaccacgcccgtggttctataaaccattagttgagcgaccacaaatgaaaaaacgggagaaaagtgagaacttacgcataaatcaatggcgtggattgagtaaacttgctttccaaccgcaccgcaaatccaatgagagatctattcgtgcccacgtcgttcttgctctctccaagctcctcgctgacacgtcgagcaagcgagattgcagagatacggcggggctcagtcacatagatcttgcatggtcggccttggatcatctcatgctcgagaatgaatgacggaatctgtgtactctttccactacctgtttcactgcaaatgatcatagctcggtgatcgtcgagcgtactcaggatctcatctttaaaaccccagattgggaggttcattctaccttgcatcatgcggtgataggacggtgttgacgatttagcaatccatgcttctttcaagcggtcatcgatacccgcgtaattgtcacgcgtaggtcccttcatcggggtgcccggcttgctaccaacaccgtttctcttccggaagttgtcagatagaacgacatcatcttcgaaggtgccttggttctcttgaatcaaacgcttcaactctttgacggtggttttgtcaacttcatcttgttggatcttctgcagtgttgcaaactcagtccagagttctctccaaactgccggcaaccgcaagtaggccttgccctccttggaattttgggggaacaagatgaacaaagccagagtcgacacgtacccctccgcctgctgcgcatttggtgttgcaagggcatccattgacacaaaagtagccaaggcattcgacttatgtgtaatcgattccactgctagcgggaatggagcttcctggggcttcgaccatcgcacctcgagagcttttctgttcgaatgacttgaagaggagaaatcttggtagacaatcacgcatgttgaatctctcgatttgcaagtctcttccaagactcgccgtgggctcaggcctgtcgatttcccaaagtcgcggagtgtgattgaggtttgggtctgtggagcaggaatacctaaaatcgagcctgaatcctcagcttcgccttggaacaaatctccaagggcatcctccattccgtcaatcgcaaggagggccggctctagctcttcgttaatctcgggctttggctgatcttctgcatcggtcgaagacttttttttcaccgggcggcgagcaaatgaagcatccttcctgagctcgtcaagcttttgctcccatatgtactctgcttctcggcgttcgaaaagcacatcccgttcgatcttggcaatcttccgctgcactttagacgtttcagggtcatctgataaattgctagcaccgacgcgacccttctttccctttccggagcgatcgaaaagatctgggtccaagctgtaaagtcgagtctgcagctccaaccattcgggaaccatgatatctgggtcgacggagctatccgagtcgtacgaaataggaggagcaacctttgctgccttccagtcagcctttttgtttcctggcttgcttcgattttgggatgaaacaggagtcgaagtccctgaagctttcgattctgttaagagttagcataatgttccaatgaaaaccttgaacctgggggtattacctgtcatccatgaggtgacactatccgtgtctttcagttgacgagtatttatctgtgtgtaagacggcaattcatttttatcactgtgcgtagccaaccattcaattgcttcatcaaggttccacacaacatcccgaccggcactgtttgagttgccagcaaagtattgcaaaacatgcttcagtgcgtcctcgacacggttttctggaaagttgagtttgagcagtgtttccctcaaggtccaaagcttgttgtataaatcgtcctcagagccagcctgttttggacttgtgatccgtccactagctatgagatagtcatgctcttcggtaccggctagttcgagaatactgtcttgaatatctgtcggtaaccactctagaaggctcaatgatactgattgctgtcggaaaacgcggcgttcgttttctagcttagtggcctggcgcgctgcgtcatttttacacttcgcagcatatttatcaaccaaaatctgaagctctgcttcttcaagatgcttttccagctcctccggggtgtagtcttgtaacgaggaggttttttgtggtgcggcgacatctgcaatccgtatggcattgcgttcaggttgcagctcgatttctggagtggcttttgattcttcggtggctggagaaggtgtggatgttgcctctggcttaggctttgagggcatggagaccgttgcgaagcctcgagccgggttggaggcgggcttcttctttttcttgctgctcggcggcattatgtctgaattatcagcgggcctagcggagatgtcttcgaagcacgctgaaagtcagcggccaaagaccaatgaatttggcctgtgtaatattgtggactaaggtgcacaatattcccaaaaaagggcgttgaaatgtgtaaagaacgaagagtcggccatgattgtttaatggcgggatgtgatccagctccccacacaaaactctttatgacagcattcctagcccacttcaccaacttcaacactctctgaaccacccccttctctctcgattcccccgtattgaccgccgatcatggatggaattccatgggatcaggtcaaggccggggatctggatgccttgcaggtcgttctcctctcgagttcgacctcgcgcaggctccgggccctacaagaactccgcgacaagaatggtagcgtgttaatccaagcctcatgacaagcagattgactaactattcattttatagggtctgaaatatcaccagaaatcaatcacgatatactagacttgctcttccgtacctatcctctctatgtcgatcgatcctcccgacaggctgtccaacaatgcctccgctctctcctccgcggccccaatgcgaccgaagagttaaaattccttgcgcaaaaattgcaaatcgaggcatctagaccaggtttggcttcctcatttgcatttgttctgttggaatggtgctgtattctgttgcagcaggccagcgaggaccagaacacaccgttggccactgtgctagacctgattgcggttgatgccaaggccctggagaattgtctttctcacaatcctaagcctgcgttaaagcagtcagctcttcgagtgacacgacgtgctttgcgcgctgtattttcgtctaaggcatggggtgctgatgcagtgcggcagtctgtcagccgactgaccacggactctaccgcagcgtacagaaatgtgcctcttctcggtgtcgtatgtggagtctgtgcgcgactagcagacaagaagccaattcttgaagagtcgaaaaaagagattttagctttctacatcaaggaagtcgtgagctcaaaatctgttgtgcccgcacatgtcgccaatggcatgtctgacttctttacttccttcgtaacatatgaagatgttgccactgaattggtacctcccatggaaaagtccatactacgagcaccggaggtggttctcaacggcgtgattcctcctctctgtgtcgctctgccagaagatattgatatctcggaattggtgcaaacacgcctttccaagcatcttttaactagcatgaagtcaaataacccatcaatccgccaaggggcatctgactcttttgcatccttgctctctcgatgcagaaccggtcccttggtcttaaagatcaccagtgaaatcattggtcctctgaaaacgcagaagattactactcctgagcaccgcatggcttacgcccaggcaattggggctatttcgccttcggtggatgtctcaaaagaggttgttcaaggattctgccctgttttttcacgggagtcgaacgaagctgccctggaagaggagatcaattcctttagcaaacaccttacttaccttgttcaatctaagctcaaggttagcgatgatgttatcagcactatcgtcaagggtgtatcagataagcgaattcctttccgaaagatctggcaagcaagtgtgggagaagtcctatggaagtctgatctcgaggttttgaagacccctgaaattgaaccactcgtcaccaagttcctcgctaaaatgaaggatttgtttggtgaggtcgcctccaacccgcttccctcggcccaaagcggtgctttgtcttccgcttatctctttctggctctgttccaccgattgtccgatattcaagagtctgccagctccgcttgggaggaaaacgtaactcaatcgatgaaattgagccccaagccttctttcctcctcaacccgaaggcatactcaaagttgagttccaaggaagaggtccagtggcttgtcagggctctggctgctgtggcctccgggtctaagtttgctagctctgaagatgcgtccaaaacagcttgggctcagacctttatctacgcgatcaccgggcctgctattccctcaaatattcgcgagaactccgcggaaacattatcccgggtctatcagacggatgtggcctcttttgggcgcaccgtcctaaatgcactgtgggcatggatcttttcattccgaaccgcagagaaggaatcagcagccgtttctgctggaccagagagcgaacgcctgcttcatattgtcttgaaggctctctgcccaaccaaggctgtcatagaaagctccggaatttcttcttctgatttggaagtcttgctcattgaaatgctgattctaagtcggcctgagttgattccgaatacctcctggattgatttgtgcttgaggaccggcacggaccctggaaatctcgtgcgcgcacaccctgatgcttgcatcgagcagttagttcacgtgaacgcagaccccctgcagtcagcggtaccgggtgttaacctcgctgtctggaccgctggggctgaattggcatttgttgcccccgatgcaatgatcccgcgtttggtcgatcaaattaaatatgatctggacggcacccgcctatctaagttcactgccactgatgccgccatttcacgcacccccgaaggaaccgcttttatcgatgtgctcagcagtaagtcgaagcagcctgcctttgataagaacactaaggactatgacactctgaagtgggaagaagaacttcgtgcgcaattagccgaaaagaagggccaaagccaaaagaaactcacacctgaggaaaattccaaggtcaaggcccagcttgccaaggaggccaagattcgtcaagatgttttggaagaagtcaagcggatcgaaagaggagcgggcattatccgaggtctcgcaacgggtccagccaacgacgtcgaggggtggatcaacgctgcagtaagttctttgctgtcgcttgcacaggctggtgcgggtttatttgtcggtgatgttgtctcccgagcattcatcacttgcgccgatgaggtgtccacccgcctcggtcctctgcgttctttcgttggcattgcaactctgcgagccatcggtaataccaaccttccctctgacatggaattggaacccctcggtgaactcgtgaccagaattctctaccgattacgttttgcttctgagcagcgtcctttcgataccacgtctctcgcctacgtgcttccgcttatctctctgattttgtcccagaatggcattgaagaagcgaagggagaagaagaaggcacacaagttctccttgctcttgagttcctgtcagctcactctggctcttgtgagttttaccccacgctaaactagtatgaaaccaagtgctaacgctgttatagtcaccgacgcccgtcttcctcgcgttgaggttctagctcagcttctctccgccatgcaaaaatacacccagcactacaagctggtcaaggataccttattcgacttctgccgatgcatctcgccgaatatcagcagcgaagagctggatacgctcttgcagggaacaattgtcgctgatgcctctgtccgaacaactgtgcttcaggtcattgaggccgagattgatttgactgacctcgatttttcagagcacatctggcttgcctgccacgacctggtggaggagaacgccgagattgccgacacaatttgggaagacaatgcgctagaggtggatgacacctcgttcagcaagatcatgaaatacttggactccaaggactatcagcttagaggcgctgccgctcgcgctttggcacatgccattgagtttgataagagcaaatttgcgggcattctttccgaactgcaatccaaatacgtggaagaaataaaacctaaagcacccgaaaaggacgcttatggaatgcccaagaaagtagacaatgcagaccactgggaggctcgcagtggtattgcgctggctttcaatgctatgaccaatggattcgatggtgacgagagtgtctcatttttgcgattcctgattgagaagggtcccttgctagatggaaactcccgggtccgtggccagatgacagagagtggtaaatctattatcattttgcgaggagagtcaaaggttgaggagatgatgaatttgctccaaacaaccctggaaacctcggataaagacacgaagacctctgacctgctgaacgaggctgtcatcgtcttatatggatctgtggccacacatctcaaggcggatgatcctcgcttgcagacagttatcagtgaactgcttgtggccctcgataccccttcggagtctgtgcagcacgccgtgtctgagtgtctgccccctttgatcagatcgtctgattccaagacggcagagtatgtggaaaacctaatctaccggctcttcaatgcccctgactatcctcgccaacgcggtgctgcttacggtcttgctgcagtcgtgtgtggcaggggtatcgcaaccttgcgggagtaccgaatcatgacccagctcaaggaagccgccgagaacaaaagagaaaaggatcaccgacgaggcgccttgttagcttatgagcttttcgccctagttctagggcggacatttgagccttatgtgatccatctcgtaccccagcttctgggaggatttggtgataccagcattagcgtccgcgatacttgtttggaggcttcaagggcttgcttccagaatctcagctcttacggtgttaaggagattcttcctaccctgctcgacggcttggatgatacgcaatggcgtagtcagaagggtgcttgcgatctacttggagccatggcctacctggacccacaacaacttgcagctagtttacctgatatcattccccctttgacaattgtgctcaatgacacccacaaggaagtccgtagcgcagcgaatcgcagtcttcagcgcttcggcgaggttatcagcaaccccgaagtaaagagcttggttggcgtgcttctgaaggctttgagcgatccaacgaagcacacagatgaggcgctagattccttgatcaaggtttcttttgcgcactatctcgatgcaccctccctggcccttgttgtgcgcattctcgagcgtggtcttagtgaccgatctaacactaagcgaaagtcagcacagattattggtagcttggcccatctcacagagcgcaaggatcttatctcacacttgcctatcattgtggctggtctcaacttggccattgtcgatccagttcccacaacccgtgctactgcttccaaggcccttggttcactcatcgagaaactcggagaagacgctctgccagatctcattcctaaccttatggctactctcaaatccgatactggtgctggtgacagactcgggtctgctcaagctctttcggaggtccttgcaggcctcggtacgaccaggctcgaggagacattgccaactattctccaaaacgtttccagtgccaagcctgctgtccgtgaaggcttcatgactctcttcatcttcttgcctgcttgcttcggtaacagcttcgccaactacctcagcaagatcatcccccctattcttgctggtctggctgacgatattgaggctatccgcgagaccgctctccgggccggtcgtctgcttgtcaagaacttcgctcacaaggccatcgatctcttgcttcccgagctggagcgtggtcttgcggacgacagctaccgcatccgtttgagttccgtcgagctcgtcggcgatctgctcttcagtcttaccggtatctctggcaagatcgagggtgatgaagaagaggaggaagccactcaagctggccaatccttgttagaggttctcggagccgagcgcagagacaaggttctctcggccctgtacatctgtcgctgtgatacctcaggccaggtcaagagtgcggccctgggtgtctggaaagcactcgtcgcctccccgagaacgctcaaggacatggttcctaccctgtctcagctcatcattcgccgcctcgggtccagcaacatggagcaaaaagtcattgccagcaacgcccttggagaccttatcaagaaggctggagagtctgttctcaacactttgctgcccttgcttcaagatggtcttcagtcttcgcctgatgtggaggtcaaacaaggtatctgtatcgctctccgcgagcttatcaatgccgcttcccccgatgcgctggaggactttgaggatattctcatcgccaccgtgcgcgtagctctggtcgacaacgacgatgatgtgcgagaagctgctgctgaggccttcgattcactgcagcaggtcatgggcaaacgggtcgtggaccaggtcctgccttaccttcttcatttgttaagaaacgacgaggaggctgagcaggcgttgtcggcactgttgacgcttctcacggagcagactcgcgccaatattattcttcccaacctcatccccacattgctcacgccgccaattactgctttcaacgccagggccttagcatctctagccgaagttgctggctctgccatgacaaggagactgccagcaatcctcaactcccttatggacggtatcatcgacactaccgacgaggagcttcgaacagaactcagcgccgcctttgacaccgtcctagtgtctgtagacgagtatgatggcctgagtgccgccatgaatgtaatggtcactcttgtcaaacacgacgatcaccgtcgacgtgctgctgcggcgctccatctgaccaagttcttcacggaagccgagcttgatttctcgaggtactaccaggacttgatccgcgccttgttgatttcgtttgacgacccagacaaggatgtcgtcaagtctgcatggactgccctcaccggtctcatgtctcacatgcgcaaggaagagatggagagcttggctattcccacccgccagattctgcgacaggtgggtgtggctggcgcggacttgcccggcttcagtctgcccaagggcatcatggctatcttgccgattttcttgcaaggtcttctcaacggtactaccgatcagcgtacccaatcggctcttgcaatgtcggatattattgaccggactcgtgccgagtcattgaagcctttcgtgactcagatcaccggtccgctcattcgtgttgtgtcagaacgttcggtcgatatcaagtgtaagtcatgcaaagcctttatgtggtgtctgtttactgattgattctgccaggcgccatcttctatactcttaacaagcttttggagaagatcccgttggctgtcaaaccgttcttacctcagctccagcgtacattcgctcgtggtctggccgacacatcaagcgagactctgcgcaaccgggctgccaagggtcttggtatcttgattacgctcacccccagaattgatcctcttattgctggtaagtctcaggaattttttatacatgggatgtagttcatcgctaacttttatctctagaacttattgctggatcgaagaccactgacattggtgtgaagaacgccatgatgaaggctctccaggaggtggttggtaaggccggtgcaaacatgagcgaggcatctcggcaagcgatccttggtctgattgatgatgacgctagcgaccagaccggtatgatcattactaacaattcacctgtttcacagctttctaacctgctcacagattccgtttccattaccaacgctcgcctgctcggtgctctcgtgaaggtcctccctgccgcaagctcggttcctctcatcaagtatgcatattcgttttcatggtttgattttgttggatgctaatatatttccttccccctaggaaccgtattcttactggctccctttctcatgcagcgatcctaggactcaatgctctgttggctgaatgccctggggttctgtcggaacacttctctgtcgagcttcccaccgtcatctgccaaggtcttgcaaacaaggatgtaagtggaatgctataccacccagtattgcttgaagctaattcagaaacagcccttcatctccgacaacagcgctcttgccgcaggcaaatacctcttgtccaacgatggcaaccatgctttcgagtcaagcaaggccatcttcgaggccttagcatctgccattcaagttggcaacccggtcgatacccggcggttgagcttggtagtcatccggactgtcagccgtcttcaccccgagctggcccgtcctcatctggctttgctcgcaccgcccatcttcgctagtgtccgtgatctggtaatccccgtcaaactggccgccgaagctgcattcttggccatattctctgtggttgaatctgatagtgaggtgtttgacaagtatatggccggtccaggtgcatctctcccaccaggccccaagcgcagcatgtctgattacttcaagcgcattgccgttcgtttggccaaccaggcgcgtgagcgtcgggaggctgaaggtggtgagggtggcttgggactgtcgaatgatgaactagacgacgaaaaggaattgtggagcattggcaaggttgaccttggagaggcctttggcgatgagtgatgatctgtttgcgtatccaaggagcatctagatgtttatagatatacccttgggttttctttgttcgagtcgtacaaaagttatgcatagtaagtttttgtatatttatattgtgtcattatacatcaccgggcagccatgtacgccgtacagagtggtggactttattatattgcagatcactctttcctagataggaatatcaaatcaggtgatactacttgtcttcagtatcacgtgatattgttcgttttttggccgtctacaacgaaagccacggcaaagagcgaaagagaaaaaaagaagagaaccccaaattgtaatcttgttattatcccagcatcttcattcgaacttttcccaatgtaagtaagcttagcttccccggactgcaagatcttcaagctccatcatcccaattcggactagcgttagggtatgcaccctggagcactccgcccattgtggaaggagcactcgcttagccctcggctgacctaatctggcccgcagtgccctctcaaactctcaccgtcgggatttctcagtgccacgaacatcatccgccaacgaccgtcgatacgccgacatcaagatgtgagtcccatctccaagctgttcttgaacttctcgaatgcactcccgtgtgctgtggagattcatgtcccaacacccaactcgtgcacccgaaattttcgttatagtggaggaacaacttcgtgatgtgtgtgctatgatgctgaccgggtctttcaccaccacagggtcaaccttaccacccagaagcgcctcgccgcctccgtggtcggctgcggcaagcgcaagatttggctcgaccccaatgagatgaacgagatctccaacgccaactctcgccagaccatccgcaagctcgtcagcgatggcctgatcatccgcaagcccgtcaccatgcactcccgtgccagcgcccgtgaactcaacgaggcccgccaaaatggccgtcaccgcggtctgggtaagcgcaagggtaccaaggatgcccgtatgcccaggtatgcacaccaccactaccaccaccgtctttgtctcctacatcggactcgcccgacggctagaaccaggacacagttgctgatgtcgattttctctgtttagccaagtcctctggatgcgccgcatgcgtgttctccgtcgtctgctcgtccgctaccgcgccgccggcaagatcgacaagcacctctaccacgagctttaccacctgagcaagggtaacaccttcaagcacaagcgtgccctcgtcgagcacgtaagttacaacccgaatcaaccccacggatgacgatcgaatatgaacatgaaccccttgaattacgcaaaggaacggatccaggctgactcgttctctttttcaccgctacagatccagaaggctaaggctgagcgtgcacgcgaccgtgtcctcaaggaggagatggatgctaagcgtgccaagaacaaggctctccgtgagcgccggttggagcgcaaggatgccaagcgcgatgctctgatcaacgaggagtaaatctgatacaaaaattcaattgcccttccgttgtttgacgcttttctcgcaattcggcggtccggaggttggaaacggttaacttctgggttggattcgggattctaggttgttcccgatatcaaactcaggtcggccttcggcatcttcctattagtctagattctgttacgactttctctccttccctttgttttccctgatagcatggggttcgtgaccttattggatcttttcggaaaatatggggtatgggaaataggaagatgcgatgatgatgtgatactcaagctattcttgttaagacgtaacgagaaagcaaaaggaaatctttttctacttcaccaaaaacccgaaacaaaaaccgcatgctctttcctggtctatactaccgcttgtggtataaacctgatatgcggagaagcagattgtgtccctctataagccagtagataccattccctcgatggtcttactcgtatactccctatactctcaatcttgctgctcgtgatcagcccctgtagctgacctatgagtggcatgtctattttccatgcttcatgcagactttatctcgataattccacgatccttagcaactgcaacctcgtgggtcaaagacctccaatgtaatttatggatcctgtacctcccttctagggatttgatcacctctatctatacttgatagctagcctacaacattgacatacgttttgtgtgaagaataaataaatcaaaatctaaccagtcgaagtatcattgccgctgaatatgttcatatatatctgtaccccacattcccataatcgtccgagtataaaaatctatgattagcagccaaacatcggggcgcaatgaaagtacaggataatatatgaaccatagggtagccatcgcgttcaactaattttgaagtatcccaatgacaattagacaactattttacctcgagcatggtttcatccaaaccccgagaatgtagaacgcgactaatttcaccaaccgctagaagaaaatcaggaaatgaaagcatggtagagatatgaaatactatgccttggaaagagaaataacattttgagttctcctgccctttccataccaatataacccaatgaactacccagacctacaagttcaacaccgaaatcgagatgaaatatgaatgggcccgaagggaatgccagtaagcaaataaatacaaacaatagaagaaaagaaaacctacagacatagcattcgtaagatcttgccgtcgtaaaccaaagcaaagccaaaaaaggcaagtgtatcagtgtaaacgtataatatatgcaggaagccaaacccaaaccgaaagaaaatcatgaagcaaaaccaaatccagcccgaactacaacttgacagcccacatagtcgggatcgaaggaaccgaagaccggtggtgagcattgggcggaggctcaagatcaagatcgaaggggtcactgcgcatgctatcacgcatcatagacgcatccaaatatccatgcggtacagcgagggaatccgtgcccgcacgctcgcagtcccagtgcccttgctcacgaagcccggcgtcgcgggaagaagtggagtagagcgagaccgatcgagatggggctgagatttcgatgattgcagacggcgggtttgtgaaggcctcctgcgctgtctcgccacgcaggtacatgctgtccagagataggtctggattggagggctgttgttgtagcggaatgactgggagtatgggtgatcgcgggccgatgtttcctgggatcgaggggtaggagtggtagcggtggaagtggtggctgattgatgagctcgttgagtcgcctcgtattagtttctgtctgagtcctagccgctctgttgttattcttcgtcgtcggtgacgcatatagagtgcgcaggctagcagggcgaatatcatgattgctgatcctccgatgatgctcccaactatggttccgattttagaggatgcggaactcaaattgtcggcttgggatgtttctgacgagtctgcgaccgtggcagttccgatggatggtgggattgaatgtgagtttgatggtgcggtgctcaagctggccaaggtactgatggaacttgtcgagcttacggagctagtcgctgtctctggcaagataggcagtgatgatgaaagagatatactcgggctagttaatggaaccggtggaatccacacgctgccaggagcatcggaatgccatgagtgatggtcggaggattcagaagtcgccgaaacccccatctggcttggtagaaccgaggttgttggaataagagtcgaaattgggggctccgagatatcaggtgctgtgatggtggtgtcctgcttaattgtccactgcgtagtcgttgccagagtcacggtcaccggggttaggtccaatgttaacgataggaagtcaagcacactggccgcggtgctggaatcagtcccggattcagatatcgtgtagacccatgtaggatggacagtttgcgtttcaattgacgtgactgtcaccagatttaaaggtccagaggataatcgtggggacaacgtctgtgtgaagttgttgagcggtacagacggagtatcaatagcggaagaagcactcgacatctcgccgagagcccgcagggggcaccgaccgttaaaaggcagatctgatgatatttgccgagtccgtattcgatgaatgggacataggggcgacgtgaaaggatggatccctttgtatgcgtattggacaaagcacaaagtgacaaagcaaccaacaaagcagtaggcttattaagttgactctgatggttcatccaagccacccctatttcttgttttgttccttgaagccttgagatagtcacgaacataatcccgtcgcaaggctgggattccatacagttcacgattcaccttcgtggtccaaaaagtgtatcatgtcagatacagagagattaaaagggtgtatacagagacctttgttttcccccgcagaatttgtgaggggattttgcttttcatttgtctagagctcggcgcttcttgtgatgggtagaagcaactcctgtgacagatgaacggcgcttagccctcggtccaataagaccatcaggcaatccacgggtggacgatcatctccagaaaatatgggaatagaatatccataatgtgacactggctaaattttccatatgcgcacgatctcgtcattattgttccctaggtaggatttgagcggggatgtgtatcatgtatcatagacgaaacacggcagtttcggatttggcgagagttttattgaaatttggactggtccatcctggtgacttcttgaagtttcatgttttgcctagctcggctgttggtatcttgcaggcttttgcaggttttgcagttgagagtatgtcgtcggcatagaggaatcgtagcaatgcctctttggtagagtcatgtgactatatccagataagtaggagcagtccacatgtatataatatccataaatgatatacgagaggaaagggagaagcaaaagggcagagactacagtactagaacaaagtacggagcaagtatgtaggagagagagtgtgatatcacttttacaagaacattcccccctcctctgttgacccgatgaaagccctgacgaactcagtcatgaatatttcaagtcacaaggaaaggtcaaaggtcataagacatataaatggtagaatttatgcatcaaattcttttgttaagtcggagagcgctgaaggacaaatgttcccgacaaattccccaccaaaagttccccagttcctttcatcttcttccatctctcttctccatcacttcatagggaagttgtttttttcttcgacttcaacttctctgtttatttacctgccaacttatctcggtgcttgtgcctttggtgcctttggtgcctttctgcctttctgcctttccgccttcctgttccctgttgtgttcccatgtgaccttggggactagaactttgcgataatcgtgcatttgcatttgcattagagctgtgattgaagaatgtttggctggggttctgggctaggtaagcaatctcccttttgctacccctcgatgtttcccctcccccgccatacccctgtggcaagtcgaaatgtcaacacaagttcacctggacagccttgttggattggagccctgactgtggcttaaagttctatgcgaccttagatatgtcagccagacttgaacgagagatgaaccacacagtctcaagctaacacaacttcgcgatagccttgccctccgccacttcagagccggagaaggaacgcagaccccccgcagacccgacacctctcgatttccccgtctataacctatccaatgtactcgaaaatgagtcggaatcaagactcaaggagatgcccgaccttttggccgacatcaaacgcccacaggacatctgcgtggagcgcttcgagccgttgaacctacaattggaaaccggcgtcgaggtcgcccatatgatccccgaagaccattcgcatcccctcgcccccttgccatgggaagataccaccgaaccgacggaagacaatcacccaccgttgatgggtaacggagccccgtatccctcgaaggaacgatacgaagtcctggaaaaagagctagcgttggataatgacgacgctttccgcgaggtggctcgattgccgccgcgtgagggtcgcgacagggttcgtataacacagtcaaggaagttctggacgggattggagcgcatggctcaatactgggataccagcctagaccattactacgagcgcccggcaacccccgatccgacacccccatctgagatggagcaagcaggggatagcacaatgcagatggatactgaggagtccagtagcagacatactctgacagaccatgaaatggacctggatgaaggacagacggtcgcgccttcgaccagcggcaatgttggcgataagcagcggccctctgtccctgtatacacgggtcgccgaattggcaacggtgccgagatgcccgatgaaattcgtgacgagacaatccgagcctttgtggagatggccgcatggccattcggatgccaggtcacagtccccacgctccaaccacggttgactaccaagaacctcctgttccccgtccggcaaacattccagtcctcgcggtccccgcgagaccgccagatcgcgcggagcggcatgctcgaaggccccgttctcatctcacagtgtcgacccgagacatctttccgcactgcagacaatacccccgggaccgggattggcgatgtaagtgatttattccgcgaagtaggcggcatgcttctcgcggcgcaagagcgtgcccgcgaaggtgcagtcgagaagcgacccggcgagggcaaatggtggaccatgcagcctcgcttcggaggcgcccccaacgatgggatcctggatgatctcgttaattacggacacgggatgtccttgccggactcaatgatggaagaaagcacgtcatctgcccaggaggcagagagcgcttccaaacgtcacaagttcgagcatccatttgtcacgtctctctcccggagaccgagtgctatgcgcagacttactaccagtgagaagtggaagatactgcagcctggacctagtctttgggacaagcggatgagttatttgcagataggcaaggtccaggagagtccgtttgacgatgtatgcatacccggcctcgttcattgaaattgagtgtgcttttgacggccagacaaagctaacccttcattcttttttttttttgcagatttacatgatctcatctatcaaccatcacgtctcaatcctccacctccgcgttcacaggcggtatttggacatcctcacccacggggacagcaccttcccaccaaccgaaggcgagccgtggcatgtgctaaagctgcagaggactcgatggttcgacctattcgatgccaatgaccgcatagaagcgctgaagggtgtgtggcaactattccaccaccagctgagacagacacgccacgaaggcgacgtcccaataccgaaagaattacctttagagtgtccattatagagcatgcatgatgctgtccgtggggacatgcttttgactctccggctctcagtggcctttctcaagcgatgcatcttgtacatatggcgcagcaatcttcggattcttcccgcttgctgccgaccttcactccgttttctacaccatacccatcttcaatgaatttacaatcttgagcatattgatatctggcgggcaatttatatcgattcataagtgatatctcttttcgactggagggtggttagatgggtgatttgggatttgtgttctgctttgatatgcttctatggatacatttttgatatctctgttttatttgtggacaacttggtttgatataatgcgtacatatggcgagaccttgacccgaaattctatcgatctgttctcagtcaggaggatccaattcaatcacaaccatctatctatgcataacttcggagtgtataaatcaagtactttctcacccattcaatatatctcttacactgtgttgtcgtaaccatccattttcactgccataaaatccagttcataggtaatccacatcccaacatttgaaccctcggtacttttgtcatagtgagaccactccaatcctatacgaaatcaccaaccctcacaacatcatcttctaatgaaatcaaaccaaggtgccggacatattcggcgtcaagactcaaaacccatgacctcacacaataaccccgatcatcaaatctcgccacacaccaaaaacgatacaagtaaaaaagcgagagcgttccagaccagccaaaagccgaccaaaatgtgatatgtccacatgatagtccctcttaaccctgcttcggttgtgtatggcgtagatggtaggagagtggagcataaataagtgggcgccgataccctttttggtgatatttcccgatctttttttctaacttcgtatacatactccgtactatacagatttacttctaatggcacacgtttccggggctgcagagtccgggcttgacagacccgacattccctcccgtaagtttctcggttacggggttcgcttgttgcggaccgggataaggctgtgtatacggagtactatatatgccctccgtactccattccctgtctgtgagctggctagtgggatctggttgcggtgagagtcgtgtgtggcaatagatcttcatttggcttttgtttcagggtctgataggccttggtgtggtgaaataggagctggttggatgccttggaaagaggaagcaagaatatgcaggtggatttatccgttgatggggttgatttaatgcttgtttccgtgtatattgtgtgttttaagcacaagtatatacatatgtagttatacatcaacggatttcgggatgggtcatggtgatgatatgtatagaccattccatgtaaatatttacttacaacatactccgtacatgaaatgattaaaagtccaagccacatcatccaaggctaaattattcggtacacacttcgtattctatataaatcctatcattcaataaaaccaagtcgtattccatacctaattggcctctcccaatcaaacccagagaacccccaaaacccgggtatcaacaaccgccagctgcaaatcagatcacatcacacgttcaaaacaaaaatcccaacccaaatctaactagtcctgggagcatatgacccgcctagcagatccataaccccctaagaacagtagagacatgggaacctcggcacggaagaccgcctaatgtggactagcaaaagtatggcgcgtacccgctttactgcaaaagccatgtggaggccgtggagagtgaagattgaagagattcgtgttcccgaggaccaagagaatgaatcgcggtagggtgtatgagttatgtacttttaaacaagagccagcacttgaacagaatgtggctaaaaggctaatagtaggagcacggaatacaagagagccttgaactcagttgactataatggtagtataaggtgatcaaaatgaaatataatatacgagtaacccaacaatctagttgtttggtctgatggattgaaatgtatgcgagtcgcttcatcgaggacgcgttggtgggggtgtatttgtaggcaagtacccctggaggttgacaacctcaacttcaatcccaggctactgcctaatagagaaatacatatgcaggagcatgacttgtgtgtgtgaatggtatgcataaagtgggtgtgattccaaaatgtcggatccgaatactccatacagccggtaggatagttacgtttgaaatatttgtccttcacggcaaggtacacagccgcgctaagaggctgtcggcggcccggcggacggtttactttgctgtagtacgaggtacggaatatacagagtacggagtacaatagggtgggaggccgctagtagccaataacttctgacactggccggccggttcgaaatcggactggactctcctctccttccaaaagggaattgatagtagctcacgagaccacgatattggttggaatcttgactttcgtgacttttgcctggtggtgggctagagcctctgcaagagcacagatcgggatcagggcgccggtcttgttcttcagttttttgttttcagtttcccttgcatctgccgaacggaccattggttcatgtgagtgagttgggtctggtatttaagcctcaggtgtttgtattgaattgctactcaagggatgatgcagcgtaaggagggttgtttttcatatgcatctggcctgatctagccctaaacttgatgaccttgcggaaggcggtagctttgcgccaggtggcggggctggtatagacaagtgaattgcgacggaatatgacaagtagggggaaaaggtcctccagactcaaaggcccagcgataggtcaggccaagtagatcccactatgaccacatggaaccgaacccacgtgggagagcatccagccggacttcagtggctaagaaggcaagtcagaagcgatcttgacgtatcagttgcacagaccactgtagaaacagggcgctcaaagttgagacgagatctcacgcacggtgaaagtctgtgttgtacaatctgtacacatcacatttcccttttgtggagcgtggaggttatgaaaccgaaccgtgtcgtgcatgcggggatgggcggagaacgaataacactagattccaaattgattggtagttccaaatcaaccttttgagatgagctctggcagatttacgaatctgtgtttgctatgcagaggagcgggagagccccgatcgtgaataatcatgtcgtgtcccgtgaaattctggattccatttcgataatgccagctaagaggcccacgaagcaagtctaggctgcccgcataactgatcatctaatgtacagtggtgatatgtctagctaactagttgactaactatggaatggaggtgatcacattttagctgaggcggcacaaccaatctatggacgaatcacgcgcttacatcgccgatgaggcctaatgatttgagattctaatggacattgagatatcgtattgccaattcacctatcagtattgtgaagttttcggcctttcagcattatgtacgatatatacccggatttcgagaatcccagaatatactctgtggactagactagtaagaacccacgctctgcataatcgtgcgatatgtttctggagacaagacatggaggttggtgggctggagttgcggttgcaatttggttttgaactttgtcattggcgcgtgtcaacactccctttttaggctatacttgtccctcactagccttacgataaaagttacaggcaactacgtcaatatgatatattgttgatgttgttgtaacacagcatgtccatgcatcttgttccatccctatctagatactggaggtttaagctgcagcccattactgcctaaatatgccaattgcacatcagagtctcagtctaatgcgaggaactcgacctattccgcgaccgctatgcaatcttccgtgttgcctcccctcgatcgatgtggggatgtttgtcaagggagaagatcgcctgcatcttccccatacggagctattccaatgcgaaggtgatcctccgtgctgattggatgtgatttaggtctgctccatacttgttcagattctgaggctttttcggacgcaaatctccacgcagtacggattactcagtactttcaactatatttctaggtatagcttacttctgagtgctgaacgtgtaggtgggtagtagtgtcatcaaagctcgagcctggcgttgcggtgcgagctcagggattgaggctctaagatacttcatagtagcattgaaagccaggctatgacataggtgtgccattgagagactggactttttttcgtttccagatagtgatcatgtcatgttgtggttaccccttgcgttcgacattggatatctaatgactttgcaaactctattccagatatctacatactgcaagatgcatggcgtgcagtcaccatctgcacgatgtaggcccgtgttattttggaggctagatctgttttttcaatgtgttatttccggagaggaataaatagatgcctgatatattttctttcattcctccttccccattaggtaaggaaatagcccgtgccgattcttatgatacccactaaaatcaagactttgggcagcgacgcgtagccacagataacggagacccgaagatctaaaccaatgcgccgttccaaacctacggaatataatagtggaaaggataatggaagcggcagatcgacagggcgagtcaaaactggaacgcagattggatactttctatgctgctcgtgattgaaatccatgtaaccccgataccccttaacggtggcaagaacttgcgattcagctgtcaaccagtgggatgtcttggaattcgcaacggaccgatgaaagatcattgcgagaatggactttgcttctaaggttaggttcggattgtttctcattccgacttttcaactcagattccgttcatgcaggtcaaatcccgtactcccatgttaaagcatacttgatatggaagaattacttctcgatgccatggaggattggaattaatcaaggaacatttgaacaaacaaagaaagaaaatcatcgcctaacaaagtcttggctccacgcggactatttgcactataagtagccctaaaatttgtatatatccacacttcatacactacccactatattcggaatacactggcatacaccgcgaacttgtactccgccacaatccttcaatccttcagcttgattcttaagtagttaaagcgggtggccacacagataggacacaaattaacggtcaaaagaaaaaaccaaaaaaacctccaaaaaaaaccaggaatgcggaggcaactctgtgctctcgtgccactttcaatcgcgcgtttgactcgctcagaagtcctccgactagggaacaccgttaagtcttctgtggcacggaggtcttgagctgcatcctgatcaagctaggggtaaactgtgttactgcctaagttgggaaggaagtgagttgctaaatgaacgtgatgtagtattcgtttgatgccaggctctaacacgatctcgggcagaaacgtgattaaattggacagcatgtcaatccaatccactttctatagactagaatggtttttggagtacgaagtagtcttctggaaggaaacccctggaacccgtggatggttcccgtcgtcatccgtggatgggaaaacgggtaaaccttggaacccggttttactatgtcaggtatttatggtaattaccatcccatttcatgtgtctactaactatggcatactatcgatgtacattatactccgtatatgttataattgtatgttattgccccaatatagatttcaaattcagtcgaagtgtctttcagagtggatgcccccaaagtgtatctcgattaaacggagcaaggtgcccgtagccctgggttgctgatcagccccgacaaccatctccctgggaagccacgggataaggtatcccttcgagtgactagtacgccgcggtggctggaagctttctgccaacatcgccgatctaaagctgcatatccactgatttgagaatcgagtccgaacagagtttatcttcagtgttttagaaatgaagcgccccttgcgagttatgtttccgagtctatgaccgacttgacggccagtgcggcgtgtgttattgggtgcttggggcgttgaaggatattgttcttggcatataacatacacctccactgcagtttcggttatatactttccgtgttctcttggaagataatagtcatagatatgtggactgatctagatatcttgttctaagagtacccgagtcctgggtactgggcagcgatccctgtccgacacaccggtcacatggtaatgaagaagggaaaaaaagaggattattaggtttagaatcaacctcaaacaccgatgttatcactctattcttgaaatccgcccaggagtcctcatcctaagccataatccaagggcaatccacccagtatacgtaactctcggaatcaagttgcatggcgcatttcccggcgaagcggttgaccttcgggcggcaagttcgatccccgttccacgcggaggatcctagcttcgatcatagcacttacatagtattctatacaccatagtctatcacatctagtgatggggtatccatatacagacacacattgcatattgtaactatatcctaaaatgaggacactgttaatttctttcctgcagagcatctcatattttcccccagccgccggacccactgcctggtaaatccagcaaaaggaaacaaaaagcagacctgtcaactgtaacttgtaagtattgtactccgtaagtattagaggttggtgcttcttttctcaggggtctatatggttattatatactctgtgtgagagatcaatggtcagaagaagtcatcggggtcatttgataatttctttttctttttctttttctttattttccttaatttgtgtccaaattcgaggtatttgatagtcaccgcgattctcaagagcatgtatttaatccagggaggggcaaacaccgctgtcgatccctacaggcgtaattataaccaagtgtgttattactttatgtcccccctcccctcctggtttagatcatttctccccttttgtccgattcttgattttttttcccttccatagttctcttttcgataactactgggacgtgatatatgtacctcggacttcaactcacttggcattgtcattaacctagaccgtgaactcaccttacatccacaatatactacgagtatccgaatccgaaccccccacttagtctacggtattggactacccacaggtacgtggttatattacgctcgtaccatacctgaccgaggtaccaaccgtgtggatacggagtacatggaatgttctcaaggttccaacttgcacttcaggtgttttccccctccttgtggcccaaccttgtacttctgtttgcgatctatctgatatacgggtggatacactgatctattttgatttccttgctctttttccttttccttgatatttcccatatctcggcctaacgggggcccctggtcggatcatcgccgtaatctgactatttctttgtctagctccacacccggttgcccactgcgccatcaccaccgcatttttgcgacctaggaaattcggagctttagacacgttatttgattcgcacgcttctaacggcgcgatctgatttcattgttacaactttcgctccttccgacatcagatccaccaatccgtcactcattcgtttccttttattacatcctacttcctcgactccaatcgatagcaccatgttggcttgagtcccgatttaccaagctcaatcgcttctcaacggtaaataccaagtgccaaggaccccaggctagttgcgacaagaccacaagacggccgcgtcttggtagcttcaaaacaccggcgcacatcacccggaccctccatttacaatgaatcgcatgcctcccccggaagggcaccacgcgcatgcgggttcgcatgtagcatacgacccctcatggcgccctgcataccccccgacattcgataaccacctctccgacccccgccgctccgcaaacccccagactaccctacccccgcagccagcaggataccctgtgatgcccaaccgtgagctaccacagttaacaccggaaggcccctacggtcgtccgaatggtcatggcctgcccctacatgcgcccgtgcattccccgcaagacccaattccccagaacttccaccagccaatgaatggcgcgccgcatgaggcctcacctgattatcgccctcgtatgggctacccgcccccagatcagatcagcagtgctgagcatacacccgtttcgggtgccctgcctcccgcctcccaattcatgacacccgttgcccaaatggcgagtgctacgccgcctgcggggtatgatcaggcattttatcaaaaccagacgtttggagcacgccagcgtaaggcgaatagagctacgcaggtatgttaagctagtagaacacagtatcgtttcgggggatcccagactaatactcgagctatataggcttgtgaccaatgccgagcgaggaaagcaaagtgtgatgagggacgaccaaattgcagtcactgtaaagagaacaatctgggctgtgtctacaaggaggtgccgccacataaacaagagaagaccacccagctggtattggatcgactttcccagatagagaaccgcatggaggagcgagacaaccgcatggatgagcgtttcaaaaaaatgcaaatgcaaatgcaagagcagttgctgaacaagctgggcaatcaaccacctccgactgtccaagaacgtccgtctcttccaccaccgccaccgctcatcaagcaggacccgcctttcaaaacagagatgcctcgtccccatgccccaactccaaatattctggatcccggcagtcaatattcacaatttggccaaaatctgggacccatggacccgagactcgaagatcagagggaggctgagggagagctctccatcccagtggagcacaccactgcagctcacaagctattgatgtggccgtcaattaagaggctgctacaccctgaacaatatgacgaggactatgtgatgcgtttggaagaagagcgcggtctcctgagcatatacggccaaggcgagatttcatacaccgccgatgacagtcaattaccaatggatggtgactccaagggctccaagggtgtccgacccgacggggatggcgcaggaccagatgctgatgtcgacatcgacgaatttgggaacatgaagctggatgctgcaactgctaggcgctactatgacagctacatcgagcacatgtttaagctccacccattcctcatgatgggtgagctcaatatcaaggtcgacaatttcatccgatgctattgtcgccctaatacttcaccgagttcggcttccagttacacacgactagcgcgcgatgggccgccaccagccaaaaggaggcggtcgaacgaaaacctaggtgtgcgtggcgagttcatgcagagcatccccaacccgccgcggccacgggtcggcaaaaatatcgacaatgccttggttatcctgtgcctggcccttggagctatttgcgaagctcctgcccctctccctgggcctatcatggacaagaagattgactaccccaaccagcgcattcctgaaccgctgccaccgtttattcctccgccgaccctaaatgggacatacgttactaatggtgtgctctcccccgcaaactccgactcggcggccatgcagatgtcgctttcgaattctctttatactgtgccaactcagcctcccgggcagtctttccctgacagtccactcaacaaaggcataccaggtctgtcaaggagagatgtgacaaatgtgcaggatgaacaagggaacacaaagaactaccaggctattcctggcctgactctctatggatatgcgaccgcaatattgggccatctacagggtggtaacgagctagagcatgtccagtgtgggttgctcgctggtctttatgccggccagctggcccaccccttccaaagtcacagctggatttatcaggcctcaagggcttgccaagttcttgtgagaacaaagcgatatgagcgactcgaagaggggcctacgcaggacctgtataacttcgcttactggacgtgtctgcaattggagagtgatctgctcgcggagctggatattccagcgagtggcatctcccgctccgagggtcggatggctattccgaaaggaaaatggactatcattctaccgaacgatctcaacgcaccccaaacgatgatgatgctgttttattctgctcaaatccatctacggaaagttttgaatcgagttcatacagacttatacaaggtcgaaaagcaaggccagacacgatggtcatccaccgttcaagaagctctgagcctaaacctcgacctctggcgtaaaagcctcccacaaagcatgcagtgggacgaaaacgatccaccagcaaacgaaattaacgccgctcgcatgcgtgccaagtattacggtgcccggtacatcattcaccgacctcttctctaccacgcattgcactacggccatacaggtgctcgcgtcggtccagtcggccactcatcagtgaactcgcctacctcgcaacgattgtctccctcaatgctgcacagtgctcgggctccgcacatggcacgtatgtctagtgacataggctctatgccggccgcagtctctgcggactggcaaccacctaaagtccgtttacaagatctgccgaggaaattgaaaggggcctgcgacatctgcattaaatcggccattaagagcacggaggcttttgacggtgtaggcggacatcggttggtcgttaccaacattttcggcactgcccatgcgtaaggaatcctctgaccccgtttcaaagaatcacagctatggagatgagactaacctattttatttgcaggcaatttggcaatatgcttgtcctatctgcaactttcatgtcaagtttaaacgagcttgtcgagccagagcaactcgatcgtctccttgtccgcacaataggattcctcattcaaagcgaaaatatatcccccaccctccgcgctgatgctcgcattctcactgaaatctacacgatgatcttccatcatcctcctgatttgagacgagtcaccagcatgagtagccacactcccagcatgagcagtcatacccccagcatgaacagccaaactaccagcatgagcttcccttaaatgtgcatccagcgtccaagttattttttttgtcctgttcctgtgggctttgcaacccgatacctgatatcctatatccttatgaacacatcatgcatgtctctgcctctgtcccttcaagcccgaatccttacacgctcaaatctgttatctgcctgtcttctataccttgtgcactatatagtccttttcattgatgattccccaaccttatccgattcaacactccacactcgtgcatctgagacaagatcagatgacacgggagttattggcggtgattgatcggtatggcttatttttatacgccgagaaatctcacccattctttcattgcctctcttcaagtgatgactggattggctttgactcgttcctttttttttttctcttctctctcttcctcttgtctcggatttcgaagcatttcgtggctccgacggtttgtccccgcagagatacgtggagttattgtcttgtgtggttattctatttacatcacatgcatcccaagccgtacacgtacgttggatgttcttggatgctcttacaatatgccaacttatttctgtgatttggctgcgccatatcgttttcatttccatattcaatgcgaaagtttgcatttcgtggttggcttttggtgttattgcattatagctcatctttagtgtgagctgtctttgggggattagttgctgtaaatttccttctcggtagtttcccagactggacaggacagatcaattgagatgaagtcctgatattgctcgatcaaaccctagtgggaatggtagctttggggttcgtgcacaagcttggaagtaccagaccctgcggttttgtgggcccttccgctcccacggtttcaactcccacggttttcatcagggccggccggtatcaaaccaaaattattcaaaagtctaactagaataatttggacgaataggcatgtatatgctattattatacctatcattcctgacaatcacagagaaagcaaatgcatgctgctcgcggacctcggcttctctgcattgtgctgatcaagagtgtgttagagaccgtatacatcaggcatccttcgttatctttcaggtcttgaaatggtaaaaatcgacatacatcccaacccagacatgacaagaaatgcaagaaatggacctcaagagaagagatcgacaccttattcctataccaaccagccaatgcttatataacctcaatcttcacagctgatgtgcacggcaaatttacctctcgaagttacttgccatcattgcttttgcccaatacgcagtccgaggctgttataatgttcgcgtcgaacatcgcagacgtagcctccaaagtccgcggctcctaatcaacaacacaggcatctataccaacaaccccagcctatacgtgccgcttgttcgaggtcaacccgctcgcgcactactggctctggcaggagtttctgtctgatacgatggaagcgaagtatggtatcgtttttactgtggctttgcttgctgggctcaccgttgcgcattatgtggtggattacttggcgtccaaggctgcggctatttcgttccacggggggcttgttgctgagctggttacatgataccatgcactttatgttcgcactgtccttgcgacccaaggcttcattaaaaccgttagtattgaagatttgacccttgaggatacttcgtttaatcccccgcttcaccctgcgaccattgccgcggagcttgttaagcaagcgcccaaggctgggtgtggacatgttgttgtgcctggatctgtttggtggattgcaaaatgatcaaagggctgtctggatggttacagcatttgctgggatgtaggttggagaagggtttccagtttgatggagctactggttggacttgggttggtctttgatactcgaatagtgagtggtgttgtggctatatggttgcgctattatctgtcatgttgatgcagatagttattgcactcttatgacaataatatttgcacacccatttaaactactttgggtatagcgcttcttggccaggctgatgcttttagttgttcgcaatggtacaggtagcatgtgacttgtttttatataggcattcgggagtgctctctgccgagaaggatagaatggatagatttagaccagataccattatcttcagatgtatcgtcgaggcacggagtattccgtactctatacttccatagatggctgggaagaagtgaccccagccagccacattctggtccgtgcacgatgcttcaccgcgattttgattcgctccacttgttgcaccgacagttcatcagcgctatgaacacatttttcacagttgcatttctcagcagatcgcctgtatctcatctaacccctaacacacagattctatccgatacccaacactagaacaagagaataaggtgaggttaagggccatcaagttgagatccactgggggccttttcggatacaagatccatgggtctgctccgttgtttactcccccaaacaaacccataacattgcgttccttctgacttacaacaaacacttccaccccacacctgcccccattccaatcattccaatcattccaatccttccaatcctttcattccacatggttcgctccggctatccacattaattgcctactatgttcaaagccctgatgggcgggggccgctcgtcgtcctcatccgacgttcgcagcagttctaagagcagccggcgcaagtccgacaggcctgacaattctgacacaagatcgatctcaagtcgcaagtccgcacggggtgacgaccgtgaccgcggcctgggtgatttgtcgtcttattcgtcttcggctccccgcagtaagcgtggcccacttagcaccgctggcgactctatctcaacctatgtgaccgccgagacagaacccgttgatgacgccgatcgcgactatattgaacgcacacccaaacgcagagacagtgaacgagaaagcaagagttctcgtcagcgcgaccaggaccgatctgaaaatccagagcgtgagaagagaggtagccgccgaggaacagaagatactctggacgatgacttggatcgggagcgcgacagtcgcgagcgtcgccgcactcagtcaggggacccgtatgtgcctccgatctccacaaacgtgtcggctagtgcccccggcgcgcagtttgccgccgagattggcgcaccgggattctcgcaattccccatgcaatacgacactgggatgccatccgcaggccattctccagcgcatgaagttccgtatgatccgcacgtgcagcaacaattccccggccaattccccgagcaagtttctgccccatatcggccgcctaaccctgctggcgctgcggcagactactatggtgaccaaggccagtctgttgagcaccagcccggtgttcggccggctcccccaagtgtgcttccgaacacgcaagctcacttgatggcagcatctccatcggctaatccacctccagagcctagtagcctgggcgaaactggtgcggcggcggcctattttgacgacaacttccatgctccggcacagcaagatcagccgccgatagtgcctccatttaaaccatcgaaaccgtctaagccttcgaacccttcatcgtcgggcgttcttcctgctgccgccgttggagctgccgcctatggcattagtggtatgatgtctcactctgagtcgcattcccctccgcagcacactacttcgtacgtccagcagggtcagccaacggtacatgaccaccagccaacggtacatgaccaccagccaatggtacatgaccaccagccaacggtacatgaccatcagccaatggtgcatagccagtcaatggaataccctccattcaagccgtcccattcgcatagcttcagtgaaggtgtcggcattgcggctgcaggtgctgcaacggggtacatgatagatcatcaccatcacccctctagccccgagcacgcacctcattacgcttctcagcattacgagcaatcttctcaggctggtggtatgccgccgtatgcccctggccctagtaatgctttgtatgctccaagcgcgggtggatacggtgctcatgctgcctacaacccgggttactatcctcacggacccagcgctctggctttccaagagcgtcagcgtggtgccatgggaagatttgttgatttctggcgtgaccctgaggccgttggaagatttgaggactacacggaaagtataggtgtgtgcaaatactgtttccaacctggtacgagctccatcgatgctcctcgcaagcaccattactacagaaaccgccgacactccgccgaccggcggagcagtgggagctccagagtaagcaaaaacagccgatacaactcctctgaagatgagggccgccgacggtcaaagtccaagcagtcttcctcgtggctgcctggcatgctagccggttatgcgaccaagtcgctcttctcgagcaaggagtttgacgattcttacagccttcgctccggccgagggccctcctcccacagggaagaagatgaccgaaggagccatacctctcgtggtgtgacccgtcgttctggccgcagtcctcacagagactatcgagcagactccaagcatgcatctcagtctggatattctcggcacacaagctcccgatctaggtcttcctcttctggccggcattcgtatctcaaggaggccgcacttggtgccgcagtgggtggggcctcgcttgctggtgcaaagtcgcgtaaccgctcccgcagtcgttctcctgaaagacgacaacgccgaaaggattcatcttcatcatcgtcctttgttaatattcccaggcccagcaagaagtccatcgctggtggaatcgggtctttcttcacttcttcttctgagaacaggaagaaacatcacaccaagaagcggagcggttttttctcgttcaagagtggctcttcatcctcttcattggacaatgatcttgccttcggacataggctgccaataaaatcttccaagcctaagaagaagggcaagaagggtccagatgttgatgccgctttgctggaacttagcgacacagcaacccgtttggctcgctcctcgccccatgctcctgggcgcactgcaggtcaaatgtacacagctcgaccccgacagtctaactacgcccactctaccacacaggatgaagaatgggtcgatgctgagtcagaggaccagttctcttcaagtgttagctctgcgctcgcattcggggaaagcagcaccgagtcttcctccgactccgccagtagcaaatggggctggagatggggaagcaagaagtacaagaagaagaaaaaggacaagcggttgagtgctacaaatgccgctctgatagctggcgctggagccgctgtgatttcttccgctcgccaccgtgatagtaaccccccaattaggcctggaagcctgcagcaagtttacccaatgcctacttccgacccatctcgctttgatgtggcatctgtatctgcaggagagccaactctcatcaggccagggcccattccccttcagcagcctcagcccttcaccccagtctcccaatcagtgtacactacccagggagctgttccggggtcgatccccgcgtacagcaccccagtggccccacccctcttcgccaatgaagttgaacactacgactcgcagtggcagttccaaggtcctcgtgatgcagcatgggcaccagcagaatcaacatacgccgaccgccgcagagatcatcgacgcagtgattcctctcctgttttccctacccaggaaactgcttccaccctcaagcgccggttcactgccaaggatcaagcgtctgtgcagtttaaattgacggaagagcaagcagagagggaacgccaccttactcgtcgcaatgagaactatcgaggtgaagttgctgatcaaccggttcaactgattgaccgagaggaggagctggcccaccaggaaactgagcgtcgagagcgacgccgaaaggagcgagatgaagagcgcctgtataccggcggcagagaaaatgactcctcatcatgggttgctgcagcggctgccggagctgttggcgctgccgctgccagcactattctttctcgcaagacaaatgatgacgaagcctctgaagccagccagcgatataatgagcgccgagaaaaacgccgcgctgagcggaagcgcgatactgatacagtagcggatgcgatcgtgtcgcggtttgagcccactcagcctattaacgaagaagtgaccacgggggaatactgcgaagaccagaagaaagggtctcctcaatcaccccgtccagcacaggtttatgatgattacgccgaattttatgcccccgaggagatacgacatagcccagatgatcatgctcgcagccgtagctccactaatatgcccaccattgtggagataaagcccgccagcgaacgaggtacacatgaggagctcgcccccacagagtcaaactattcatacgaaccctatcaacacgtggaccgcctcccatggcgagtccctgggctcaacttaattgagccaactcctccccaaagcgtgaacggtagtgctgttcgtgacgctacttctccaaccacccctgtgaataagtcttatgataccaagcctcacgaacgaccaaccggctcccgtgtctcctggggtgagcaccaaactcacgagtacgaagtcccttcttcttctgagcaggatcctcttgagcatgatatttcccctaccgaaatttccgccaaggatgttcctctcccggcatccaagatatcccaacccaaggatatttccggcccattgcaatatggggccgatattgaattcgcggccacaattgctgctgcgaccgccgcagctgggttcgacccctctttgatcacagacgacccatcctaccacacccgcacttccccccccgggtcggagaacgaacacacatttacctcaccctggtctgcaccggctcgcaagcagccccacggcttcgtcgagggcgaggtcgaagaaactgatcccaaatctactaagaatatcacttctacccctgagcatgtgatccaggacaaggatgagcttctcttcgacgagccagaatccctcttaggagatcaggatagttcgtcgggccgccgtgacaagtcctcaattgcgcaggaggtcattgagcagctgaatggtaaatatggcaagcgcgaccgtaccacttctcctgaaaaagatgtagatgtcctctcgatgcctggtggctttgatacagccaactctatagacttagccgacgccagatccgtggtctcagcgccggcgcctgttatcatggacccggagaccccgaccaagtccaagtctaagaagccaagggagaagggcgatgccgttgatctctccgagttccaagagcgggaattcgccgggtctcctattctgaaggacgagacaccgaagtcccgcagctcccggcgtcgcggcgacgattttgagatttatgaatcacaggggacgtctccatctcgggctgagacttattctgttgtctctgctcccgtatcgaagggtgaaacatccaagtctaagcccaggaaatccagaaggagtgataatgacttgggcattgctgaataccttgattccgtggctccggagtctcgtgatgattctgtctctgttatctctgctcctgtttcgaaggacgagaggttcaagtccaagtcccgcaaatctcgacggagcggggacgatttcgcgatctacgagtcacgcgaaccatctgaagctcgggatgatatccgctctgttaactctactcccatcggcaaagagtatgtgtcaaccaagtcagggaaaccaagacgcagtggtgatgattacgagctccctagatcgcaagagatctccgaatctcgtgacgacaaccggtctgtcttctctgcacctgtctcgaaagacgagaccagcaaatctcgccggtctcgacgtagtggcgatgatttcgacccacgtcgtgatgccgaagcggcttctgatgacgcggaaggtgacgaggaaaaaaagagacgtcgcaagcgtcgatccaaccgcgaaagtgacaccttgtctgtcgatgacgatgctcgcttgaccattacggacattggagacgacaagtctgagcgccgcaagcatccctaccgctcatcccgtgaaactaacattgatgacaatgcctctataccctcttctccagctcaggttgacgagtccctggagaagcgccgtggcaaggataagaaagaaaagagtgcaggctttttgcgaagtgtctttggctcacaagtctcggccccagctgagaatattcggcctgaccattctcgctcttcttctttagataagcgctcatcccgcgaagcgatatctgaagctggtgtggatgatgaacgccgtcgccgtaagaagcaccgcagctctagcaatgctgatgagctggatccttacatgtcggacaaggagaggagtactcaggacgacacaaatctgaaggagtacaggtctagtagacagcaaaaggaagagcggcgtcgtcatcgatacgaggaaatcgtggattcgggaaggaaacgggaatccgagaaggtatagcatctgaacttttctttttacctacttatgttgtgattcttgttgtacactttattttcccatatagcttcccttttttcactggttgatctaaccagcttgcacaaaaaccacaaaacccgaacaaaaaaagaaatgtactaagcttttattggttttattccatgtgcaggacggatatagtgccaacttcgacgaccaattctttctaaggaagcgcccggatattctagccgcggatcagcgtgaagattatggtgcttcgtggcttccagccccagcggttagcgcagctgttgtagctgcaggatcagaacggaatgagatcccgcagcagaggccccggagccaatccacctctcccccagccacggagaggacacttgacttgaccccgaagtctctgagccgccccgcttcacctggaacaggccgcccccaggagtccccattccccaagcaacgccgacactccgtggctaagtccaccactgaatcgccgacagccgtccctctccacttccgccgtcccccaacttccccaggcctctcgcgcgcagtccccgttgaacaaccctcccccaccgcctccccaggctccccaagccagcaacgcaaccgccggcctgcatcggtcgagtttcgaaactcgcgcgagatacgccctctatggctcgtcgagcgccacagtttgatcaagggtgagcctgagactgaggagcccttgccatcgctcccatctagcaagacctcctcccgagccccgtcagtagaggacctaaaatcccttcgcgaagatgacggccttaagagctgggagcatgtagatctgagccactcaatcatggagaatcagcggccgactggtctgatgatttcaaccgaccaaaccaacgagagtcatgatagagaccttgatctcctcggctcgcagcaggccacgcctactgctgaacacttccagcacgcggagcctaggaaggaaaggcccagatacgagttccactccccctctgagctcctgcgggaccccgctgttctggacgagttgcctccgtcacctacactggacatcctgccttcagtagagggctcccttgttggtgttgcctttagggagcaagaaacgcagcgtgcgcttgatgctcttgagggcgtatctcgccctcagcctgaggcggaaaccccggcccaagaacatgattcgtccttcagtagcgctgcagatttcgccaagggcgctggctctgccggtgttgtcgatgcagctgccgttgccgttgccgttgccagggagcatgacgagtctcgctccttgcctgcagatgaacccactaagacacatgacttcggcgatattgtcgatgcagcggttgccgctgacagttcctctgacgaccatggcaaggcccttatcagcgaggagacgctcattgagcccgtccctgccaccgaagagaatcactccgctgacaatgagtccgtgcaaccgggtatggaggcagccaaggaagtcgatcctgaatcgactgaacaccttcttcagtcttccaatcttcaaactcaaccagagactgaaatggcccccgataagaatgtggctactcaatctcctaagaagagaaacaagaagaagaagggcaagaagaatcaggcccaagatgcggatctggtagcctccgaggaaccggccgatcaagagaatttatccaagaagttggtgcaggaccctgctgaagtgcctgtgcctgaagctattactgctgagcctaagcttgctgtcactgagcaatccgagactgagtatgttgaggtaccccacgagcctaggcctgagcttcaggttgatgagcctgcagtcgaagctgctcctgttgagttagcccctgtccagactgctcctaacctcgagattgcgattcctaagcaatacgaggctgagcttgccgaggtatcccgcgaactcaagcccgcgcttgaggttgatgagcctgtggtcgaagctactcttgagtctgcggccgtcgagaaggattctgttaagtccgatgttgctattcctgagcaacctggggctgagcctatggttgaagctactcctcttgagtccgttgcggccgagagtgctcctgttaagcacgatgttactattcccgaggaagctgaggctgagcctatcaaggcctctcgagagcttgaaattgagcctttggtgacaacgcctgaagttggcacggctcctgaatccgaggctacccaggacaccgcatcatcgactaaaaaggctaagcgtgacaagaagaagcagaagaagaaatcaaaaagtgcgtctacttctgacgagcctgcaggtgatactgtccttgctcggccccaggatgttacctctgcctccaagcagagtgagggcgagcagcaagacatcggtcttgccgccgaagagattcaagcaccgcctttgcccgaggatattgctccttccactgagaacacctctgacccgactgtgatcaagtctgctaccactgatgaagagcaagttcgaagccagcaggaatccggagagctggttcagcctgtggaacatgtgcccagcgaggaatctgttctacctgtttccgaagatcccagtttgcccatcgagaaagagcagaccccggagcctgattttactgacgctaaagaaagctcaattgccggtgcccctcaaccagaagtggaggaaatatcccgcaacctggaagagattgataacccatctactccagaggccccagtcgatagcaccacgcctgaaatcccccaaacacccaaagaagacaccgaaggcgaagacaacttcgaagaggccgttgaagaacatactccacagctcgccgaggaaaaggagcctgcaacggaacctcgcatcgacgtggctgcacatgaccctgtagacgcatcagaaacaaaggcagagaagcggaaaaacaagaaaaaaaagaatcgcaaatccgctgctgtcgaagaaactcgcgagactgaatcccagctagaaatccaagagcttgaacctgagcaatcagctggtgccgatcctgcggatacccgatcccctccaattagcggtgaagccttaccttctgatcctgaacatcttgaacagcccttcgaaaccaccattgaggagcctgcagctgcccaagagcagaagcaagttccattggaggccactgtggatgtaacacctgttgcaaccgaggcagtgggccccttggagccacctgatgaactgtcacagccaattgccattgaggttcagcctagcgccgaaaacctggatcctgctgaggggggtcctgacgaaatctcacagccttctactgttgagactcaacccgaaaccgaagttcaagtcgagcccgaagtcgccttgactacggcccaaaagaagaagggcaaaaagaataagaagaagggcaagcagagtgaatccatcattcctgacgacgagaagcctgctgaatctacctcgccggtacctgagattgaggctgccactgaggatatagccaagaaagctcctcttgtcatagaaggcgcactgttggatgcgcctccccaggagagcgagatagagctgcccatcaagttcgaacaatcgcttggggccgagccacttcccgaggctgagctactttccgaggttatgccgccccaggaagaagcttcttttgacccccttccgcaaccagcgatacaggcgacagaggcagagatgcctaaagaagaacccatcgcacccgaggagcagcccaaagccgaagaatctcctgctgagccagaggctcctatgaccgctgcggagagaagaaaagccaaaaaggcgaaaaagaaacagcaaaaggagcaggaagagagcattggttccattgtgaagcccgttgatgctgttcctgcgttcgatgccgaacccgctgatccaagcaaggatattgctccaactgcagaaattgatgacgctgttccagccgacttctctggaccggtttcttccgagcatgctcaggctgaacaggaggttgcgcctatacttacagaacccgaggcagctccactcaccgatgatattcttctgcccggcgataccgagactaacgaggcaatgagagacatcgagccccccgctgaggctaagccctcgatagaagacactgccccgtcgtttgagattgagcccgccgaagctcccgctaatgttccatttgtaccggaagaagccaccgctcccgtcgatatgcgccaagattatgaacagcaagacgatgttgtcaaggcagaggagctgaagagcgaggatgtgactctagcgcccaccgaagaggcctcggcaaattctccagagaccgatgcccccaagacacatgaaaagtctcctgaaatcgaggtcccaatgactgctgccgagaggaagaaggccaagaaaaacaagaagaagcagcaaaagcaagagtctgtgcagcttgaagagaagcctacgcctgagaataagcctacttctaccgaggagaagagtggcgaacaatttggcgacattttgcctgatcgtgaggccacaactactgctgaagccgttgcaggccttgatgagcctacagaacccgaggcagcccgtgaccttgaagctgagaccaagcctgaagaggaacaagctccggatgtgccaatcctcgattgcgaacttgctcccgagacacccgcagacaagattattcctataccggagattgctgaactagctattgatcttcgaaatgacgacaaagaaagcggcctagagcctatagttgaggtccccgctcccatggaagacccacagaaagagcaaaagcttgattcggccgtcggcgaggagcctgttttagacaagtctctcgaagacgagcccacagagtctccaccagagcctgttgtggaggagattcagtctacggaatccacagaaaatccagtggtggaggaggctgaaggtgaacagacggcatcttcttctaagtcgaagaagaagaataagaagaagcgccaatcagttgccgctgaggaagagcagcctgtacccgccgacgaagagtctagggctgcccctgccgaagaaaagaataacctcgcatccctggaagaggcgcctatacctatgctagccgagagtgaatccagcgagctcgcgctatctaaagagcttgaacagccttcacacgatagagacacggagcctgttattgtggtcgaagagccctctccagaagaaaccacgcagctagaggctgctacggatgtagccgccaccgaggccgctgcagaggccttaatgacccctgctcagaagcgcaaggctaagaaagataagaaaaagcggcaatcagttgccgctcaagagcagcagcctataccgaccgaggacgagtccaaggctgttcccactgaggaagaggttcaaattatacccaccgaagaggaacctacacctgtgcctactgagtgcaaatctaccgaacccatatcatctcaggagcctgggcagacttctcccaataaagatacagagtgtcccattttgacggaagaggcgcctaaggccgaagagccctcctcggaagtcacagcacaggcagagaccccttccaccggcattgagaccgctgaagagtcatcaatgcctcctgctcagcagctgaagggtaataaagacacgaaaaaccgacaatcagtaaccactcaagagcagcagcctataccgaccgaggacgaggttaacattatacctaccaaagaggaacctacacctgtgcctactgagtgtaaatctaccgaacctatatcatctcaggagcctgagcagacttctcaagatacagagtgtcctattgtgacggaagaggcgcataaggccgaagagccgtcctcggaagtcactgcgcaggaagaggtcccttccgatgcagccggccctgagaccgctgaagaggcatcaatgactcctgctcagaagcggaaggccaagaaagataagaaaaggcaccaactagttcttgccgaagaggaacagtccgtgcctgttgaggggtttaggtctgaaccagtcgagaaagaggtcacacctacgccagccgacgagaagcccccttctgaactggctcaggcagagctcactgaccctatgccgactcagggaaccgaacaacttgcggggacttctattatggcagaagaaacgcctgaggccgaagatccctctgttgaagaggtcgcgcagcaggatctccctacccatgcagccgccaccgaggcctctgaagaggcatcaatgactcctgctcaaaagaagaaggcgaagaaagataagaaaaagcgccgatccgttgtcgccgaagaggaacagcatatacctgctgaggtgcccaagcttgaatccgctcaggaagagcccactgtcgacaaagatgcgcaggctcttgttatgacagaagacgcgcctaaggacgaagaaccccccatcaaagacgtcacgcagcaggatacccctgctgagggaggtgctaccgagggcactgcggaggagacaatgacccccgcacagaaaaagaaggccaagaaagacaagaaaaaacaacgcaagtctgttgcttttgacgaggatgctactccgatcgaaggacccaagccaggtcaagatttatctacactcgaagacaaggttgaacctcaggatgctccggctgacttggttgtctctggagaatcagacaaggagttgccagtggccgaagaaaccaccaagtctgctgctaaaggggaaatttcagagatgatagaagaacccgcttcctctgaacaaagcaaagagatcaccgaccatgaactagtctcaactgctgcgcccgacaccccggtttctactgaaatcgagttgccagagcaggcggaacaatatgctcagcctccctcggagcccaagtcacctagtgcacaagagcccgaagttgccttgactacggcgcaaaagaagaaggcgaagaagaataagaagaagggcaagtctgtggacttagctgacaacgcccctgctgccacagacgcagcgcaggaatctgatcctaaatccgagcttattgttcaaacttccatcgatattccggctgcgaccccggatttgcaagataacccagcctctgagccagtacagctcgcagagggtctagagagtgaagataccattgacgccgaggctcccaaggccgaggaagtcgagccaacagaagccgtatcagacgctttgtcgaaagaggaaaccgctggcgtcaaggagaccgacaacgagcctccggggactgaagcaattgtcgatgctgaggcaactccctccgaagaactagaggccggtgcccattcttctgcggacctgaacgaagaagctggtatgtcagccaaggagcgacgcaaagctgccaagaaagcaaagaaacgccagtccaagaatgtcgacaccgataaagacgttgcaacatccgattcgccttttgccccgggaaccgagcctgctacacccattgaagcgaccaacagcgtcgaaaaagtcctcacttctacggacacagacgtccctggactttcagccatatcggcaccctcgcctgcgcaacatgacggtaaagaacatcagtcccacgacttaaaaacttacgacgccacggcgcaagatacggcctcgactgataaatacgtgtcttcgcaggtagagcagacgccgacagagagtccttttttagattatcctccccaacccgtgcttgagcgttcagttgattccggcgagttggtggagggaaatgatcagcagaagcgcgatgttgcccttgctgcacatgaacgggaggaggagatggttgagcctgcatctcttgaggaaatgaaggaagtgaatgatggtgagaatgttgaggagaaatcgtctatgccggaatcaggtgatatctcaatgaagaaagaaattgaagagacgtctgttgatgtgcccattgatgctgtccctgaggagacacaagagtctcgtgtgggggtggcttctaagacagctggctcgaagaagcagaaaaagaagaaaaacaagcaagaagagggaattgcagcttctgagcgcgagacctatattacagacgacagggagcagcttgaagctgcgcctttggttgagggcgagcatcagccggcaataaaggaaatcactgagcctgagcctattgccgaggccgaactagtgctattcccagagaagcaaccgggagatcactcacatgacatcgaagagattgtcgctggccagaaaaccgaggacgttgatgaaaccaaggatattagcattccacaagtcgagggcgttgctcctcccagtgaagcggccacgcagccagaggccgatgcagtcgccgagtccgctgaagaggcgccaatgactcctgctcagaagcgcaaggctaagaaggacaagaagaagcaacgccaatcaatccttgctcaagaatccgaacctgggccccaggctgaagaacagacagcatctgaggcggctggaacttctctccaagaggctgaggttgcaacggagtgggcacctgccgaagttatcacgcaagatgaggcttctactagcccagataagcctacagtgcagcctattgatgtccccgaggaggccaccaagaatcttgtaacgccttctcaacatactggaccgcatgttccaagccaagaaatcgaaggtggagatagctctttcgatctctcttccaccgagccgaaggtcgaggagggagacaagtcgcctgaggaagcttctggaaccccggcggacgagcaacctagcgcacaaacgccgcctgaacctgcccctgagcccgacggggaatcggcaactatcgctaagaataacagcaaaaaagagcagaagaaggccacggccgctgctactactgctgccatcaccgccacccctttcgagaaagaatacccacaatatcccgaggagccctcgacgatcacgcctgaagctctggagttggtggcagagcagcctatcgtccaagggcagcagccttcagagactgaggacaagcctcggtctgatgcagaaaagagcctagacgaaacaacagaattcacaacttttgagccgaaagaagatgttttgaagcagcctgttgatgctctcgattctgttaaatctctcgaatccgaggtaaggccggagcagtctacaaaagagccagcccaagaatcagccgccatcaatactattactaggaaaatgtcaaagaaggacaagaaaaatgccaagaagaaagccacacaagaagtaattgagccggctgtttctcctaccaaagatcatgttcctgccgccacgactgcaactgcagaagctgctcctgaaccagaggtgacttttgaggagacctcagcggaggttgttcctgccatcgagtctgcaactaccgaggctgatgttgaatcggaggcgacacttgaaaaaaacccaactttttctgagcatgagtccatttccccggaagaaacccaggtggctccgaatcacgagcctgaaaacaccgcaacgacggctcttagggactttagcatcgtatcagataacaagcaactttcagaaagcaagaaagatgaactcgtcttacccatccaacccactgacccagataccaacaatgagccccttcatctcgaggatcctgctgagaagaacgaccaagattatgaagcacacgttgggactgatgcagaccttgagaaaagagctgatctcgaagtcgtcgaggatcagcctggagaatacgaagtgatgtcgcctctgtccaagaaggtgtcaaagaaggataagcggaaggccaagaagatcgccggcatcaccgaagaagtttcgactcaacaacgggaagagcctcaggttgatgtggctgagttacccacggaatctgagatacagccgacagagcctgttgtggaaccggatacttccaaggaactggaacatgttgcagaacctcaccctgcattggagcaagggccgtcaactgaggctcccctactaattgaggatcagcctgtatccgggtctgaagttcaggttgagcctatgcaacccgatgaagaggccgtcgttagcgaggaacttcctctgtcacgtaaggccttgaagaaaaaggcaaagaaggcccaaaagtccaaaaagtccctggacactgagccaccggctaaaattccgattgaagcagatcaacatgccaccattgtgccgtttgaagataagaaccaggacacagaagcgcctggtgaaaagtcggctaatgacgaagactggccgtcgattgactggcaagcaaaatttgaagagtcccagcgatcaagggaagaggagcctgaacctgagccggacattcgaccttcagaggctgagattataggagaatatgttgatccttcattccccgaagtttcgcgagatgcaaacgaagctgcggaggaagataattgggctttgccggcgagcaaaaaagacgagctgcagtcacaccaagctgcttcggaagcccaggaggcttcactgggtccctttaacgacaaagagattgaacctcctattcgaacaactactccaggtggatctaagattgccaacttatttcccgacctcgagcgtgcgggattccgacgatcagctttggaccagcaaacaccgtcgctaaaagatagtgctgaggaagagacaagagcggacttggaagcgaatcgcgatatcgcgatccctgtctctgaagcacccctagcgaccactgaaaccaaaagaattggcgatgatttcgcctctgacctgcctagcagtctcgaaagacaaattgagtctacaatctcagagttgaaagctcaatccgaaagtcctgctgccacggaggatgaatcaatcagggggcctgaacttccgacgcatcgcgaaaattccttagatgcgtcattgccattgtcaatggaaccctccagtgaccggaatcgtaccgaggaaccttcttctcctacgcgccttccgcctggggcggaagccggagaggaactgtgtgagccacgccgatcaccatcaatccatggacggcaccagcatacacccaaaacatggagtttggaagaaccgtctctacaagctctccgtcccccttcccctcctcggtcgctcttcggaggaccgactgacgattatgtgcgaccccggactccgcttgatacaattgcggaacaagaaccacgggatggccagggagcgtccatggctcatcgcgggacgccccgcctggagatgaagcccgagcatgtcttacctcggcctcagacacccgtccggaagtttacagacaatgcctttgatcgagaggcttggcctacagaaaaccaaaagggcgggggttcaaaccccgatattccaaaaacgcctgagcaagggatatcaattctgaaacccagcaccagcagcggtaaattacgtcgtacaaatcgcagtgttagtggcgatctgcgggcggctagtcgagcgctagattcccagccttcgaatctcgatctcgatcaggtcccgtcttcctcctcttacgaccccgtcaccgacaagggcaaacgtcccctgcgaagtatgtcggatgtctatgtaagttattaatttatcccttattttcatttgcgattgcgattgagattgcagttgcgttgtcttgtcttgtcttggtttactaacttctccaggagggatggggtgagacgcccaactccccacggtcgcccagccgaccgcctagtgtccgtcgccgtcgcagcatgcaacatttgcaagacatcgaaacccgcctcgaccagctcatctctgaaaatcgtctactgatcgctgctcgcgatgaagctgaagataagcttcggaataccagcgtcgctcgtcgaaagagcgaccgtgcccttaacacccgcgacggcgatctgcgcgatcgggaatcggaggtggaacaattgaagaactcggtggaatggctgcagaaggagatgactcgtctgacccaagagaacgagggactgacggcatccaactctgcgctcgccgccgcccacgcagccgaggtcaacaccctacgcgagtcgtccatgcgcgaccttgccgacttacagttgcgacacactcaactctcgtcccagatggaggatcgagttcgacaagagatcgagtcggctcttgcacaaaaagatgttgaattgcgccgtctgcgcaccgaacttgaggtggcccgcgataaggtgaaggagctccaacaacaaatcgcagcctcggtacatgacaatgcccttgtcttccgggatgaagagtacttcgatgctgcctgccagaagctgtgtggccatgtccaatcttgggtcgtgcgcttctctaagcacaatgataagcgtcgctgccgcttacttagtgagttgcaggacgaaaagatcgcagaccgttttgacaacgccctcctcgacggcttcgatcccgatgcctacctatctgatcgtgtccgccgccgtgatgtctttatgtcggtggtcatgacgatggtttgggaatacatcttcacccgctaccttttcggcatggaccgggagcaacgtcaaaagctcaagtctcttgagaaacaattgggcgaggttggtccaactcgtgctgtgcatcgctggcgagctaccactctcacactgctatcccggcgaccggcctttgctgcgcaacgtgaaagtgacacggaggctgttactctggaaatcttccaaaccctatcgcaggtcctccctccgccgtctcatgttgaatcccagctcctggataacctccgcaagatcatgcgggtagcagtcaacctttccttggaaatgcgtacccagctggctgaattcattatgctaccgcctctgcagcctgaatatgatacaaatggcgatcttgcacgccaagtgtacttcaacgcagccctgatgaacgagcgcagcggtctgacgaacgacaacagcgagctcgaagcccaacagtccattgtgcgcatcgtgctcttccctctcgttgtcaaaaagggcaatgatgtaggcgagggtgatgacgaagtcgtcgtctgccctgcccaggtcctcattgcccgccctagcaaagacaagaaagtatcaaagatgatgagcggtgaccgcatgtccatcgatgcttccaagtcggtccacagcattgttcaaagtgttactcacagtgtggcaccgtcatctatgatggacatgagtaatgtgatctgaggcgtcacactccgatcatgattgctcccatcttaacatgcgtgcttgctgcatccttgctcttattgtctaatgatttttcttctcttctctcgtcaatgggtgatatggcgtccaggtcatctaacgtaacggtcattccaaggccaatgaccatgaatatgtggagtctttatgttcattttcattttcattttcctgttttctatttgattttctcatttgttctttcgaagacaatgtgccagcccgatgtgtattatcatggctttgatgtcttatgagtgatgacctgtacttctggtatggcagtgtaataatctatttcatactttattctttattctttccacttatctgtcttttacagtttatttcttggccctcggctagaattgtaagacttctctttttataagaatcaaattgggttgtccctcaagagcttctcgggtacagctccggatattacaccagctacctcttcaaggtaatctttttgaactcagcagtggtgtccctgatggctacttcaacaggaagtcgctccattgaactggccccatagaagccatgcaaaccctgcaccctgtctaatacgaatttcgcatcccctggagcagcaataggcccaccgtgacacagcacaatgatatctttattgatcctcaccgctgcatcccgcattgcctggatctccacaacacattgttccaacgtctttccagtcttcgccccaatcaggccagaagtagtcagacccatatgtgccaccaggatatccgccccggccttcgtcatagcctcggcatcctcgacgttgaaagcatatggcgtcgtcagaatatccaattcagctgcctgccgcaccatctccacctctttacaataccccatcccggtctcctccaagttggcccggaagttgccatcgactagtcccaccgtggggaagttctgcaccccggcaaatcccaattcccgcagttgcttcagaaaccgcgggatatccttgaatgggtccgtaccgcaaacacccgcaatcacgggaatattctgaacgatagagatgacttcggcggccatttcaaccactacctcgttggcgttgctgtacggcattagtcccgcgagacttccgcaccccgccatgcggaagcgaccgctattgtatatgatgactaggtctgcgcctccggcctcgaccgattttgcggaaagaccgatgccttatggtggattatcagtcaaactgatagacagaggcaaccgaaagggacaggtgacgtcaagtacataccggctccggctccaacaatgggtttcccgtcttcaatttgacggcgtagatgggcgaggatttcgctacgggaggtaggtggcgccatagtaagaaaatggaggtttggaggtttgtagtttgatcaattgttcatacagatcaaaatgggagggatcttcccaattatatgattcatcgtggggcggacttaatggagcgcggatgcggacgagatacacaaagcgcggagaccgcggacataagcgtagggatcactctctcattactgacagcaaatcattgagaaatggattctcaaacgccccagattaaggccaatgagtccgtcaatacattaaataatagaagatgaataagctatcatcctacaaccccatgcatataggagacgaggactaatttacttggactgccagtcaacatataagaagtccatcatatgatgtcatatattaattttatgcactttctatttcaatagataccaatcggcaaggatcaagatatacttcccatcgcattcataatcagatcccactgatcccaatccatgtccattggattaatccattgctgtggctcgatttgacgaaccagaccgggaaagccgacattctccaaggtgaatgcgtggccattactaaggtccgcgggctggctgatgggattcatctgtctatttgaattggggccctgtgagacagaattcggcaatccatccggtaccagggccgaggtagtcatccacttgctagatctagagagttgtccgtcagttctcattaagacgtatgtcacgcgcgctaggcaacttacagtatctggccgagaatcgttgctgtccgggtgcacagctgactttgcgcctttgacgcctcgagtcgagcatggcattcgtgaagcagtcgcacctcgttcaatgtacatggtttttggggctctatagaaagggcaagcaccaagacgaacgcggcgtggaaagcgtggaaagcgcctcggccacggatgtaccagtagaagggcatgaactggggcagtccgtggaagtctgcatgtagttctaagacgcgctgtgcacttttcaggcagcgatgctttgaccagctatgttgcggtagacaaacggtttcttcattcagtatattactgtggagaatgaggactaggtgatgggaaaaactgagcagcagatttgtatgaacaactgatgagctgtccccaagcatcgaggcgtaactctgctctagtgggtctaaatcggcttggatggccgcgtccaggcgttggagggttgtcggatcgtccggccgtgcagccagaacaggattacagatctcggaggatatctgaaaaaggcgcgattttcgaaccagatatgagacaggtttgatacctactgaggttgcaatgggtgctggttgtccctgtacgatgtcctcatcccacacctcagctgtgggcagaacacgcgacgagaacactgactggtatatatcaagtcctgtgatggccagattttggttacagagcagcatggtcaggcctagccaacagcggcgacgctcttcggtttcgacgatatccagggaaaacgtggccgggtcaacgtgacaaccgatcgacagcgccagatgatgaaccaaacccagaagagtccatgtttggccatgactatggtggatcccatatataaggttcagtagcgcctgtagtgttgagatgttgtgtcgccagagatagcgatctgcttcgaggcatttcatcgccgcggtgtaataccgctctgagagttccgtgactcgatcccaaggggtatgtttgcggctgagagtcttaagcaggaggctgtcattttccagtgcgagaacagccgtgcctaagatagtaaataggagagcaagccatgctagggagacctgatctggatccttggaaaattgatgataccgttcgtgaaacgtagggctatgtaagataggaaagagcttttctatgttaattttcagtcaacctgatgatagcggtagataggaaacctacgggcgcaatcgaatgaaaatatagatcctttaactggttgcaatactccgtcggtgggagttttgccaagagattaggtctgttttcagcatcgtgttcaccaaaaggatatggaccgctgggcgtgtcaatcatggcgctctcctggcttagaaatgggctctcttgagttgctcgactgaaaacacgccggccagaggtaaaggggaggaatcggacgtgtcctgaagtggatgggatgagagtgcccgttgtaaacgttgtcactggtcctaatctccgggtctcttgtacctctgaatccaattgaggaaaattgagcgaagatggtgttgtatctggctgttggttctttgcatgcaacagctgctctagcttttctatccgagctaccagatccgcatctggttctccggcgagaccttgataatgtggttggagagtggtctcaggggatgatgagcgattttccagtgggcgagcttgtggctgagactgctgcggctggcgctgtgagggttttctcctggtactatagacacattgctctagaggaacacggcgtcgtatacaagtgccgcaagcggggccatttcggggacatcggatcttgcgaacacggcacggctcacaagaaatcggaagacgctggcgtgggtggtgcgcggacatagtgatacgcactaatatatagccaaggatatgtaatatgctcgcggcttggctggacgaggtcgcagtcgaaggcggacatatacggagaaggcgggattgagttccactttgttttctccgcgctttgccaccaaatgatgctacaatgtgaggacctaaacacgcatctgtcagtgttaagttaaagcctagacatagtcaggtcattcaataaattccctataatcttccaccagctcattcaccatgccacgtatcatccttctggggacccttgacaccaagcgtgcagaaattctatatatctacaaccagctacagcatattgccacccgcttctcgacgcctctagagattaccttgattgactgtggccgtcaagccattaacgacgatgccatcaccataagtcacaccgacctgatatccaagtatgcatccggcgacagcaccgatctattgacccagccccggggacaagtgattgaactcctcatcagctgcgtcagtaagtgtgtcaccgaattactgcgaactacggaggttcacggaatcattggtgctgggggtagtggaggaaccagtctgatcgccgccgtaatgaggaacgctgcacctcttggccttcccaaacttgtcgtcagcacagtcgcgtccggggatacaggaccgatggtaggcgagtgcgatatcacattgatgtactcgatcgtggacatcgcgggcacaaatcggctcctccgtgaagtgctggggaatgcggctggcgccatttttggcatggcatccacatatcaacataggctggatgaacgccggacccgaagtctgcaggataaacagcgagaagagaagaaaactcgagtcggtattaccatgttcggggtgaccaccccgtgtgtggatcgtgtgagacgtcacttggaagagaactattctgtagaggtctacgtttttcatgcgactggccatgggggaaaggctatggaacgattggtggaggacggctgtctagacgccatcttggacatcacaacgacggagatctgcgacctcattgccggtgggactatgagctgcgaaaccagccgcctagagatgacactgaagcgcggaatacccaatatcatttccattggagccacggatatggtcaattttggtccagtcgacactgtgccacgccaataccgtgatcgcaagttgctagtccataatccgagtgtgaccctgatgcgaacctctgcagccgaatgtcgggaagtcggggatttccttctcgacaaactaaaccggtttgcccaggaccaaagtatggttgaggtgtggcttcctaggggaggagtgagtatcattgggacggtagggtcggaatttgccgatgccgacgctgatgccgcccttgctgacactctacgctccgggctaaagggcagcaaaatccgagtggtatcggatgagcgagatataaatgacgatggatttgcactagacattgcggatcggcttatggctctcgtggcgaagcattcttgcagtgtcatagcgagctagacaagtctgtcgttagttatcagacaagcagtgtatgcagtggctaggaatttgaatttatctatcgattgctagctcgacaccgacatgatccgtccaactttcacctgcgaaagcctaggctgctgtcaaagtcttgtataagacctgttgttcagctgattcaagactaggtgaagtatgaagaacctcaatttcaaccttgtgcttgttcctttgcctttgcctttgatctcattctatactaagttgtacggagtagttaactacaggcaattggattttatagttgtgctgacctcatccaccctgttttaggaaaagcctcctgggctgtcccatggaattcaaacagccagagtctcatctgcagccttggagggacctcggtatttctctttgtattggattctttcttttttcttgttgtacactttagaaaaaaactggactcgttcccacttcctatttaaatccgaattcaagactttcttgtccttgttttcttccaggaatgttccactctggctttgccacccgcgtcatcccccaaacctgagctgcagcgctgtcgaccatgccgatgtcgatttccccatgatcatccgcgctagtaagatcgtatggaaagctgggtatcggtatcctacatgctgcgagtcttagcactgtttgcgttggcctagctccattggttgatgggtgggctgctgaaaaattaacctccgcttcagtgcagttgctctgtaccggagatatccaacatcaatcgcaacccaattattggcgctgtcacaatggctccgcccatgatcccaacacctggcatagcggcctcccgaccgcctcgttcctcgcattcgtctagccgtccacagcacagcgattatccacccgacgctgataacaacgctagctatggcccaatgggcggcggtcgggctccagggactagtagtccggtacccgtctcggagaccacgccagccaacaatacccgcttcatcccccccgctgattatgctgctggcaaaccctccaagtcctccaagcgcaaaaagaaccgcaatcgcaaacgtcgcaatcgacaccagtcttttattccacctagccgggaggaatctcatgatattcctggggagacttcggatgctggaggtgttagagattcaatggaggccgaccggccaacctcgagggacaagtcgttcttcaaattgggacgcaatctgagtaacacaagcttggagagcgatgcgttgttagaccatcggtaaaatctcgtgatattgagcgatctcggagcttgagatagatactaatttttctttccgaacagggaccaacctttgatgcgacctcgtcgtgacagtcgcgttgcatcgtcattccggccgagctccctaacatccaatgtcttccgatcgaacgatgggcaatctcgcagcaccccgaggggaggacggggccaacaacatcacaatggtgatagtgacgaagaggatgccaatgatcggaccccattgatgcggccagtttccagtcacacgcccggcaataattggtatggaacggacaatcgcccgaatttgttctcctcacgtgctcgacagtactctactcggactatgtcctccggctgttcaccaaaggatgatcgcagcccactctattctcccactgtggagcgagactacgatgtcaacaacccgccgtccattcccgggtccccaaagctgggcccggagatgaattatgacgatgccgtggtaacaggagctgattgggacttctcgttagctcggacaatggagaatcaccgggagtctatgaacgccttgaacgacacgctgatcgacatagacgggaatggattgcactcacattctgcgccatcttcttcgcctgggtcgccgcttctctctcctcaccaagaattacggcggcgccggaccgtgacattaccagcacaggaagatgtatgcttccccaccgaaacgatatccgaattgggagacgagggagcgagacaaattcctgatgaagccggcgaacgtcgacggcgtagacaccggcgatggcccgatctctccgccctggaagaatggagccgtgaggaaaaagaggagcgcaatggagacaatcgagtcaaaaggatcagtgagcctatgctcatcgcaggccgattgcgccctcagtatacaggatggcgacgtgaagaggatgaggcgccttatcggttcacatatttcaacgaggaatttccgagcaccattcatgctcaaaccatctctgagctggtacagccaggtggtagcttccgcgatttgtttattccagatcctcccgaattggaagattcgtctgaagacgaggactcggaagaggaatcttttatggagcatgcagctctcaatcactcaaccaatcccgccaacaagccaatatatcacacagacaatcaaagtcaaggccaaggccatcaaacgagcgttaatccttgtatgacacctcagaccgttgttcccaacggaagaactgcaaatgaccctatgactggcaatgctcctccggtcagaggaccctcgcgtttatctgtcatcagcgaaggacacccagactcccaccgtgagctctcgcccgcaccttccaacaccccttttagcaaaacccccaatccgaaacctaaacgctacggtccacggccgactttctggctagatgtcctctccccgacagatgcagagatgcgtacgattgccaaagcttttgggattcacgcattgacgacagaggacattatgatgcaggaagctcgagagaaagtcgagttatttcgcagctactatttcgtcaactaccgtacttttgagcaggataccaacagcgaggactatctcgagccagtgaacatgtatgtggtggttttccgcgaaggcgtgatctccttccatttttcgcaaacacctcacccagccaatgttcggcggcgtatccgccaactgatggattacctgatcctcagctcagactggatttcatacgcactgattgatgacattaccgatgtcttcggtccgctgattcaagcgattgaaaatgaggtcgatgagatcgacgagatgatcatgaaaatgcactctgccagcaaggaggtgtcgtccaatgacagtgtgcttccttcattcgcaccaggagatatgctgcggcgagtgggagaatgccgcaagaaggtcatgggactgtaccgacttctcagcaacaaggccgatgtagtcaagggcttttccaagcgttgcaatgagcagtgggaggttgcccccaagtcggagattggcctgtacctcggtgacattcaggatcacatcatgacgatgactggtaacctaacgcactacgaaacgtaagtttcttacctatatttaaggctggtctatccaaacgttgaagtcgctgactgtgtcgtccagaatcctttcccgtgcacactccaattatttggcgcagatcaacatcctcatgaacgagcgtcaggaacatactgccgatgtcctgggtaagctgactgttcttggtacgattgtcctaccgatgaacatcatctgcggcatgtgggggatgaacgtgaaggtaccaggtcaggaaatcgatagccttacatggttctggtgcagtatgtatttccttttctttgccagatgatttgctaatacttcatagttaccgccggactatgcgtatttgcatttgtatctgtttggactgctaaaagagtctacaaaattgtatagacgtacaatgtgtccccatgttagtttctacatttcagtcgattggatcgataccctatattttggtttggttatttgcttgttgattttggggaccggggggggggggttgtttctttcttcttggtctcgggctcgggctcgggctctgagtaatcggcgtgttttttgttttgtgttgtggggggcggggggggggggttgtttctttcttcttggtctcgggctcgggctcgggctctgagtaatcggcgtgtcggttcttggatttgatatacgatgcatgtgttgctctttgctacatttgggaggttctcagatatacataggatgaacgtaactgtatattacttggaattgttccctcggacgactataggttatccctttttggtagcgtttaggattcattgtctttttggtaggaacaaagataataaggaacccctcgaagcgaccctatatatagacaagctgaataacaggcaactgttcgactccaaagaaacaaaaacagtttcatcttcactgttgtagtgaagattgtacacccaaaggcgaggctgtagcatgatcaagccattgtatttcccttacatgagtaattaattattccctgcacgctgcacgttttatttccattaattaccattaattaccatttattacaattcccggcgtcacccactggtcatcaacctcgagaatacaaaaccccagtgacttcatctcttggtttctgttcgattcatcctcgttccctatttcacctttcaatcctccctctcttctctgcttttcaatcacattcactctctttcccgagattcttctactggattctagactatccgtgtgcttccctgcagtgacccctcccttcttgacgtggaccacgatcattggcctttgccacaaacctgaccctctctgtcagccacttttcaccgaggttttggtcaccgacttctcttgcacatttggcagcccagccgccacgccagaacgcgtaaaaccagtcaagccaaaacgttgagccggatcggcgggtcacttttcgccctaaatccgccaaccagatcttgtcatcttcaattccttcgttctaggccttccttttacccttcccggcaacaaagcaaaacagcacaagtgatgtgtgtgctctttgcgctaccctgacccccggcccacttgctattctaaacaatatccatcacccctgcacctgctgcagcctttttttcgcttgtgcgtttctgtacagaacccaatttctggcaacagcatgtggtcatcggctattcgttctgctggaccctcacatgtgtaaagacccatattctgtgcaacatcttattcaaccctcgtgatatctcattcgcccttaccagcaacaactcaacctcttcgccgtcgagctttccctgcccgcgtgccgtgccttgctttttctgcttacccgagccctgtctctgcccaactgtctggctacctctcgggtctcctgacttgtctacgttgtgtcggcccattctgacgcgacaaggactatggctgcggagtccgagaggccgcctcaccctnnnnnnnnnnnnnnnnnnnnnnnnnnnnnnnnnnnnnnnnnnnnnnnnnnnnnnnnnnnnnnnnnnnnnnnnnnnnnnnnnnnnnnnnnnnnnnnnnnncggggggggcgggggggccgcctcaccttaacggcagctctggtctatccagaggcccgaaggatgcagagccggcgtcagaccctgtgcatcgatcggccagtgaaggtggcatgatggaacggtccatcgtcacatcccaggctcaacccatgtctcaggtgcccacgcttttttccaatcctacccctttcgctcccacgtctaccaccaactccgctgcttcctcccgcgaaccctccccggtccgacgctcctcacgtacctacaatccttcctcgcccagccgggtatcttcacactcgcgaaagaccagtcaagaccagtcaagtccgacccgacactctaacggtttaatatctggcccacctacaaactcatcaaccccgaatcttcaacgttcatcctcttctcctgtcagatcccttgttctctcggctcctaccgactcgccagccaatgttcctggtccggataagtccaatatgccatcatgggccgcgaaccgtcgcacagatctggattcgacccttccgaatacttcgcacaaacgatcttcattgccattggaggatttcacacccaagcaggaccgaaacacaacccggactgtggctagaggcgtcagtgggcaagggtcctcactagaaaccgtcgaggagatggcaagcaatccctctaccccatctagtgagacttctatcaagcctgtaatcgcggaggagtcacgattgcaccggatcgatgaagacccaactccacctgctccgcatcaaactttgggcagtggcagtgacagtggtgagaatcgaagttcggaaccgaaggaggaggctcgtccacaggcgtctggtgcggccaaaacacccaaaactctcatgtcacagcgatcaacaacatcactcagtgctggtgctcgcggaaagcctgccgacggctcagttcgcaacatgattgtggagacagagaccgttagttcgataccgcaggtctcaatgggagtgggaaatggtgagcgaggcagtgcctcgcgtgcagaccagggtacacttcgcatgaaaccttccaatgagacgattcgtccgcgcaaagaaaagaaaaagatccgtcgacccaatagcctccttacgactggccccgtaacaagcaaagcagacattttcgaggctcgagtagccaatgcagtggatgaggctgatgtttcggactccgacgagaccttcgtttacgactcaaacccgcctgatccgtatccttcgcgaccaccccggtatcactctcgaactcctagtgcgacctctatggcgagtcaagcggaccagttgggtagtcgtacccgagggttgcgagatgcttctcacggcgtgacaggcaaacgcagcatgaaatttaccaacgccaatccctacaacaacagcagcatagatggcgatggggtcgaagccgatatggcttcgcgctcttctagaacggatgggagtggaaccatcactccccggcatcacaatttgggtcgccttcatggacgcaacggcgtgcatccaaatcttttcgataacgacagtacgcactcgcacggtcaatctcaaaagtctccacgccatttcatcgggaatagctataggcattcgcgtcacagcaatacccggctgtctcccaactacagaactattagcggtgccaagaacagcagcgagtttcatgggtatgactacgaggcagagggtgcggatgacgaacgcacaccgttggtaggtacaccgcgtacactccatagtcggagtggtcgacggcccaacagtgcaagcctgcgacagatggagtacatggcgcaccgagaacgcggacttttcgctcgattcggctcctgcgctattatcttccttatgttgttgattgtcgctggaggagctacatcattcatcattgcggcaacccaaccccttctagatgtccaggtcattgcgattcaaaacgtgctggcttcggaacaggaaatcatgttagatttgaacgtgcaagctgtcaatccgaacttgttccctgtgaccattgacgacaccgatgtcaacatattcgcaaaaagtcgatatgttggaaccgacaagttttggcgtgagcatgatgatctggataatatcccacgcgtggagcaaagccgacgtcgctggcagctgtcacaagctgtgaagtgcctgggcaatatggactgtatcaagaaagccatgcctagcttctctggcccccacgtcaccggcggagttgacaagggcaccgatcccccaaccgatccagaaggcgatccgcgatctatgttgcttggccgcgtgttccacttcgattccccgctatctttcgaatcatctccttggaatcatttgacttccagttccaagggacagatacgtctaggccggccaggaaacaaaaccgaggctggaggtacagagcgctgggagcgaatcctccaacacccgtttgaattgactgtacgcggcatcatcaaataccagctcccactcagctcccgctacctctcggcatctatcagctccagcatcaaggtggtgcccgataccggtgacaacgatccggagcaaatacctccaaacaacggtacagtgcaaatttctgtaccacaaagaagtgcacaatccattcgccttccactcgatactcgttccaccgcatcggaggattcgagacgacctttcacggcataacaaatttagcgatagatcgatatcattgacttacgacagcctatttcgtgttaattattttttttttttttacttctttttattcttcatgtaacgcgacgaaaagcaaagagcctattgcctttggcggcccactctgtatacattatacagatacgcagtatggcctctatcttcccttcagacttcatcccgcagtataccccgtttgcaatttccgtctttttgtgctcgcaagccttggagaagttctatcatggatcaactctgtctaggtctcgtcttccctttccgtcttttctcttgtcttcgaaaaaaaaagctatctcggaaatggctctcttgtgttggtcacttccttcgttggaatggatgcatgcccttccatccattccttacatggcagccggccttacccgcttttactggaggttcttttccatgtctattcttcctggtgcgaagcatgctgtatctgtactatctgtctagtttctgactgatctcagaattggtcttgtgttatgtatctctttgtacagcgggactttgagaaagacatttttcgctattagctcagtcttcgaatatgagacgggttgggctttcttaatttcgtttcattttattacagggttccgcatctgtatttctttttgttcatgtcccttgtaaaaaaggatatgtatatcctttgattttggatacataactatattaattggttaaaagaacagatatgttaggtgtatatagttcaacttgtcttctgatttggcccatgacatccatggattcatttgcacacgccgtgcaagatccagttctacttcgaattcgctcgtagtttatgctgctcccctatggttttacttaaaaggatccgtaccaaaaagacttttcaaagtatgacctatattatcttatgaaaaaaaagcaataaggaatactctatctgaacacatacacatcataaatcattatcatcggcggcaggcatcattcataactttgtgaccaacaagattgagcatgaaacatcaaggataaaaaacaccaaggataaagaagataaagagccaaagagatgtggttaatgttaaaaaataaacttgaccaaggcaaaacaatccacctaaagcagaagaactagacataaggtcaaaggaatagacggggacaaagtgggataaatggaacaccacacagcgacccgctagaacagaaccttggtaaacctattcaccaggtcctcaaatttatccacagcgggatcccgctcgggaagagggcggccttgcccatcaaagcggctgggtaggtcgatggttgagtcggagtctgcttcaggggctttgttctggtctctttcctcgtggtgtttcggggctgatgggtgatgtcgatggtgactagaatcaggatagaaattgtgacggtctgaggcagtagaagaaggagggggcataggtggatagggcacggatgaggagcggcgatgatgatgatgacggctatcacggtcacggtcacgatctcgatctcgatctcgatcgtgacggtggtctctacctccgcgatgcgaagacgaacccgatccaacggtagagtcactgtcatcggtctcgtagccaggatcgtgcggaggatccgtcaagtcgaacgcgacagatttcggcggttggctaattgaccggggggcagacgttgggaatgggtggatgttcagacctatcgattaaggatcagctttgattacattctatacagtcacagttgtggtccgccgaacccacccttgtgtgcgtggtttgcatcaataggtaggggtctcacattgtcttcagccctacgcggccgatgtgtgtactgctcgggtcccggtcctggtggcgcagcgccgtaggcataaggctgaggtggcgcagcaccgggtggtggagggtagtctgctggattgtatgaagcgggggtgctgttcaggttgtaggttgagtcgcccgggggcggggggtagtagttggggttggggttggggttggggttggggttgctggggtagtagtgggggtcaggcatgggcggggcacttggggccgcctgcggggaaagcgggtatggttctggattgtaggattcttcataaggatcacggtgcacgttgtcgtcatgcgctgattacaccactagtcagggtaaatatttctcggtaggaatttgatgaagtggggacttactggagtgttcgcgatcgcgctctctggacttgcgacgctcgttgtacttgtgggcggcataaccgagacctgttgcgcctagtgcggcccccgcgaggtctcgtgagcggctgcgatgccgtcggcggtgaccttcgccgtcagaactggatgaactgctgtagcggactcggctacgactgcgactgcgactgcggggatggcgtctggggccataggcttcctgttcatcgtagtagggcgcatcaggctgaccgtagtaatgctcagatgggatgctacctgcgactgggtcgttgccgtattcgatcaggccggccgagtcgcgagttggatcgggataggactgtgacggggcgcggctgtgagaccttgagcgatggcggccccggctcgagccctccttttcatctttgtcactcttctgcttctcgtagagaccggtggcagcagcagtggcaagaccggcagccacaatgggaagagcttgtctcaggcgggatcgggagcgctcaccctttcgagagcgcgactggctgcggaccttttcaaccaggccagccacggccgcaccagccaatccagcctcagccatgtgcttgcggcgctcagacatgctgcgtttgccttgttccccatccttctccgagcgaccacggctagaaacccgagaacgggagcgagtgcgagaccggcttttgcgctcatcagcttttgacttgctacgcagtgcagccacaccagcagccacggctgcggcaccaactcccagctcgagcaaagtctttgcacgagagtgcgattgagagcggctgcggctgcggctgtggcgactccggccatgtctgctgtgacgatgggaagaacggtcatcttcaaaggaatgagaacggtgacggctcttactacggtagtagtcacgagcatgcgatgcagcactcacagcgactgcaccaagagccccggcaccaatagtcctaccaatacggctggcgccatggctgacttcgccatcttttttgttgtggtttcggagcaattcagccgcgccaacacctaccaatgcaccctctgcgagatggcgacggtggtgagggtggtcgtcataatcgcgggtttcctttcggatgtagaccatactgtcatcgctgctgtagtcctgatcacgatcgccgcggtggcggcgactactctgggaaacggaatcatcagggctcagctcacgccgggagcgagcttcgtcgtactcgcggactcgacggtgacggttgtaataatacgggtcctcgtccacctcagagcggcgcacgacatcatactcggattcacggggactagtataaatgcgggcttcacgaataagtacgggttgttttggggtggacatggtagtagcagtaggggacagctccactcggtccagggaaatccatggattggaagtgtggtcgattggtgtggggatgtagggtactcacaatcatagtctctctcatagcgtgtgggtggctcatactccacctctcgctcgtagcgcgagacggtcacaggctcttcacgatccgttttgcgccggatcaccacctcgcgctcgccgccaaaggagtcatcgtgtctcgacatgaagtctcgacggtcgtcttcgggagaaatgacgtaacgcttgattgacacaggacgggtttcatcccagtctcgttcgcgttctctgtaagtgtacgacatggacgtaataagggtagtgagaaatgggaaataattgagaaatgagtcgagaagtaaaagatgaacggcaaaagaaaataagatgtactgcagggaatggaggggcggcagagaagtgggggtgtgcagagaggatgtgatcgactaatggccgaagatgactccagtaggtacagtcctctcgggctaattctgattggtaacggttatcttggccaaataaatcaaagccaataaaagccggtaaaagcccagtgggtttgaataatgattcagaatgatgagagccgtccacaggttctgtagggcagagagcggagtatgtattggcacgcactcaaccggcttagtctcagactagatgatcggcaggcagcactatgtatgttggcctcggataactcggaatggggatttgaaaggcagatgataaattagtgaacaatgaggctgcgagatgaaaatgtgaaagagaggatggaggggagaaataaaaatggaaagaggtcaagaggataaaaagaccagacacgtgaggctctttctctcgggtttggcaatctttgcccgggtacggtggcgaaacacgcgaaacactcaaagaccgtggctttattttgtttacaacagactcacttggattgtttggttcttcccgctgcttaacccacgggattctctcggctggctcgggatgattccgtggtccccaattttatattgatcctacttcggtagatgcagcctcacctaaatgtcatctgctgcattgacgggtacatctaagaatggatcggcgctatatgcacacagtcatgagagcagtttcctgtaacgtttcagtagggcacgactggattagctacaatccacacattgtattatagattaatcttgatctcgggttagcattttaggttgccgttttaaaatgattattggggtcttagcaaagaagattcgttctactaggcgccctggaggtgacatcatatggggagcacaaagactatccccaataagagggcaacaagaggcgtataatcctgagcgccctggtcttgatttccgtatgggagccccgcggatgacgtcaatgtcatgcggggcgttcttggcaactaattgtttatgtacccaagtacggagtaggtaactacaacttatgttgtagtgaaggctgagtccatcatgtacttcgcccctggggtttgaacaataatggtataaaagaaagaaaaaaattaagtgggtctctctatgttatatgcagaggccaaaaaaaaaggaacagagacaagttacattgcgtttcctcctgttgaaccaataacagatagaatcatcgttggcagatattgagtcccgaggcagcgattgtaagacttatgtttcaagaccacgagtcacagatgacgacagcatcgctcaaaacgatgactggtaaagcctagactcgtactgcatatgctgtgttggcgaccagcgctaaagtcaggattcgtcacaacattgtttccttgctatttttacaaggccgtgtatcggcctttgtccaccgagaattttaacaattaaccttttgctcatcatggtatgagtggcgttagatataacaccccggtgtcttttaggttttgtcgaggttacaaccttccaaaaaattagcacggagtaggttcatatttacgatagtaaaggcggtaaaaagtataggccgtacagagggcttagttgtatctcagtgccagtacccatcgaccacccgatatgactagtaatacggtgatcaccgtgaccaaggaggaaatccactttcaaacgataggaaagtagcatccggggtttttaatacaacatacaatttaaattcgttggggatcaaatcatctggcaccctttgctcgcatctccaatccacctgacatgtacctgacagtgcgtttcttcaaccccgctatattttttagtccaggttacaattttagtttatgggaagtcattcaaattttcccttatcatttcatgagagaccccagcctagtgttagctagaaaccatctacgtgcgacagtgcgcaccataatgcacacagcagaaataattgttgaatttcgtgtcgaacagaattggctgtcaatgctagtgtcgatgtcatggattaccaatgcaaatatccttgtggggccgttgataagcctttatacataatgaacataggaacaccgtactatgctagatctccgtctttctaaaggccttaggtacaggcaatctgacaggggtatcggttcgtgctgtgtcctgaatgagatgctcgaacgaaggcgaggatccaacacgaggcgtgaaaggctcaaagtcccagaggtagcctagagtacgcaggatcgaagaagcagagtaagatacgacctcgccatccgagttaacgcccttctgttcgacctgacccttagaaacccacggcgagatcaagagcgtcgggacgcggccaccgagacggtcgaaggagaacgtatactcctcgccggagggtgctatctcagtgtacgtcaggtcatccgggcgggtagccagcgggggtgggacgtggtcgtggaaccctcctgtctcatcaaaggtgaggatgaatagtgtctcttcccactgcgggctggagcggaccgcgtcgtagacattcttgatgagggcttcgccttcagagacgagaccggttgggtgcatggagtttgtgcccacgccgcagcaggacgggtcaacgaaagagaattccgggagcgtgccggctgccgcatcggcataaaagttatccagggggactgctttgtcggagttcccactcgtgaaggtccagtcgaagaagtaggcatcgaccatactagggcttgtgtagtagttcttccaggtatggttggtttctgaaagctgctggaagatcgaacgttgggtgaggccgtggacgcctgggttgaaggcctcatcgttggtaccgtgaccagcggatgtgcctgagagtacaaaggcccggttagggttggtgggctatttatatatgttagctatgcgcgacaattagagagtaggaaatttgctcggacttacaccggggtgatccgaatgccagtggttgaaggtgaggtagttctgcaccagcgtggtcattaccggcacctcgtcctcgatatagtagttgatgacttgcttggccaggtacgccttgtcagcatcgtcgccatagctgcgtaactgctcatgcacaaagccatgctgggtaggagtgagcattccctgagcaatgtggtcattgcttgggatgaaagtgccataaaactcaatattgttcccagtcaccgagtgatcaggatcatccagaacagagtcaaagtccttggcagagctgcacacctcgccagctgaagtatcggtcaagttgtacgggttgcagaaagggccgttgttgatagggttctccagtcccttgagagtctggccgccgagtaggttgtccacagagcggttttccatttccaggatgacaacattcttgatcctgcttttcagattggtgatggaagatgaagaataagagggttgctgagcctttgcatcagcggagatcgccgctgcaaaggtcaacaatccaaaaagggcactcgatttcatcatgaatcaaggagacaggtcggttcaaagtctgggccgagtgcttgatttcgggagatctgaatcaagggatctgatgtctctcttatatgttgcattcagccaaacatccctagcattcctcggaacaatccaatctcccgttccacgtgttgctccggaacttacggctcgattgagttctgtctagagatatgggtatggggagtggtagtaatcaggctgcggggtcatatgaatcaacaatctcacagggcggggggtgaatgccaatatgaaatgcacctgattggtgctcttcgcatcgtccccataactcatatgtgattggtcacttaggattgattggcaagtacctcaatcacgtaaaagacgtaccaacatcatataattgttttacttcacgccattgaggccggtgatttaccagtactaagttaccaccacgccaagtattcgcacagactgcgaaagtgccaacgcatgaacaaatgaccctcgaaaacgaggtcacgagttgtttggctaggtatgttcgttgcaagcaatttcatcaatgagacaacatgggctttcccacgctagcatgactaaaagagcgactttgacaaggctcggcatacagagtcgattattgcaaaaggtaacatttgatgcttctggctgatctacttggaactgctaccgctttctggatttgtaataccgctcgttctctctcatttttaattggtgagtatttgaccggcagaatttggggtgctaactactccgtagttattgaccaatagtaaataagtcccatggcggctgtagtctcacgcgctagtaattggctgttaaccttaggtgatgagttggattggctattttgtagagtccgatatttacgagtcagtccatcctacatatagtgagtacatttccagggttttgtcctggaattctggtcttttgctcctaacgcagcgggttgaccaggtagcacgtgacacaatgtagcattcggagaatatccaaataatacaacatacatgtacaagcttgtatagatgcgggggtgaagtcttcgatcaagaataactcatctctatctgtaaagtatagatgtcaaactaactcacccttattgtatatgtacctgtctaggcatatggagatatctttttatatctaactttattataggcacttgatcatcagctatgtcttcgcaagggagaatgctgcatgaagcagggacaatatgcttccgaaagaggaaggtcggtatatatcacgtgttgataccttatattggcacgcaatgtttgttaagtatcaccacgcgatggaccagattaattgtatctatagactataccctttttaatatatgtttgatttttgaacccggggtacctgaggactcatccaacgtgactgtttagaagattccaattttcttcttacatcgataatcggggtaactgtcgatgatgccatctacaaatgtctccgccccgccatgaaaaacaattaataatcatatctggatttccaatctaaccgcccctcgtgcttcgtcgcttatatatatatacatcgcttattttttttttcaaaaaagccccttttgtttctaacttgtcacatagcagtatcctcgtactgtgaaatacattccctctcatccgcaccgggttcaacatcccactactcccatcgcgaggaaagcaaaacccaacaacctcgacatcacacaaaccctttgatataaaaccatcgacacacaaaacattataaaatgacgacagcagcattcagatacatcgaccgagcttcctacgaccctgatgccacagagccattcaaaaagccatggggcaaagtcgacggaccaggtcggtcctaccaactcacagaactggaacgaaaagtcgaggacctccgaggccaagaatcgaacttcacaacagacaattccggtttcgccttatacaagtcacccgcaaaggagaccgcattcaccgacgatgctgaagtgcgagcgggttactacccagaagtagaagacctgctgcgcaagaaactgcccggggtgaaaaaagtagcgatcttcgaccataccatccggcgccgggtgccgggctcggcgcgtagtcctgtgcagctggtgcacgtggaccaaacgcccaaagctgccgaggcgagagtacgtcgccacctgccagaggatgaagtagaggagctgttgaagggtcgataccagattatcaatgtctggcgtccgattgaaaatccagcttctgatttcccgttggcgctgatcgattggagaagcattgctccttctgattttgtcaaagttgatcttctttatccgaaggagtggcaggagcatggagaggtagcgcctgattctgagtcatttttctctacggatgggtatgaggtcaagggagagacttatgctatcgctcctaatcaggaacatcgtttcttttacgccaaagatatgacacccgaggaagtcatgttcatcaagtgtttcgattcgagaagccacactatgactgggggcaagacggatattgctcatgggtccggacatactgcatttattgacccgcagactcctgctggatcgcccgggaggcagagcattgaagttcgatgtctagttttctacgaataagccttggggttctcatgtcacaatgggtgatgcagtcaattcaaaaaaatataatgtctcttatgtagtttctaccctgtatatcatatcatcctcattatcgtgatttatgttccgaagttgtcaatgagtggggctcggccgacagtcactcagctcccaatggcactagaatgcgcctttgataagtagtaacattagaaatatacgtaaaaactccgttaaacagttaaaagatacgcagattacgaactaaccctgtcttggcaagattatgtgtacgacttcatgtgagtcacagaacatcccctctctatcgttttttgactcttcacatccactagaaattttcgacatatgtagctcgcatctatcgaagtgatctgccaatttatcaatttacaccaagtccgcccacggagctgcctagatagtgagccctaacactgatggcctcttctaccctacaacacactaacatctaccgcaggattcaaaatgtcctcttcaacatcagaactacgagaccaaccagaatgctggacaaagggagaatacgtagtctcaaccgacgtatcccgaatccctatcaaaactctaaacacctggtacgctggcgaagagttctactgggcaaagccaatgccggagtccgctttgcgcgaaacattgcagaactccctctgcttcgggctgtaccatgatccagaccaaaccttaagccagtcagtcaagacaccagagaacgacgcattggcagactccacaatcgaattcgtcggctttgcccgctgcgtaacagactacacaacatttctctttttgacggatgtctttgtacttacctcgctccagggccgaggcctgggaacttggcttgtaagctgtgtgcaggaggttatcgagacaatgccctatcttcggagatcgctgctgcttactagagattggaaacggtcggtgccgttttatgagaaggttatggatatggagcttatggtatgcaaccctcctgttgatgggaaggatgcggtgggatttgctattatgcagcggaagtcttggggggctcctggggttggagagaagccctaggtatctcagcggggttgagaatgggttgctttgaaattattacattataaatagaattattgtggttagagatatagctgattgaaactcttttctttccatcacttcattgctcatatgcctcatgacctaaatattaattccatccagtatgccgccaaaatccaactcctaggcccaaaccatgaaattcaaatagtcatcatctcatcacatatttaatcaaacccatgccctccagtaccagaccctaacgtatcccatggaacagaagtaggaccgatccaattttgaggatgcatctgaccgaaaccggaatgcatggtgtgatcactggagatcgatgcaatagttggcaccggcgatccggattgcgagtgtggatgcgagatgttatagctgtcctgcattgtcattccctgggggaggtttgacattgagaggggcatttggatgcttggtaggaggtgagcgtgggactgggattgaatattggcttggttttgttggagttggacttgggcttggacttgagcctgggcctgggcctgggcctgggcttggaggtgggattgagagtgggtaggtgattgcgggttgtatttcgttgaggcaacatcgctagtttgtatgttagtcactagtccaggggagaatctaggtaagggcggggtgtaacttggacatacatcatctgtcgaattatgggaacagccttgctgcagaagacgctgcggactgagagcgaggcgaacatatctaaggcccgatcgagtatatctttgatctcttcgtactcggactggccctcggggatgagcaggatgacagccaatgtgactgcagcgtggaacgcgtggaaactgcctagtccgctggtataccatttgtagggcttgaacgattgtgtttcgaggagagtttcaaaaatggaaagtgaagccttggcggaagcgatgcacttagctcttgtagagcaagtttcagatgtaatctcgccttgtaggtaacggcagagacttgggcggaggaggagaaggagaagctgatggatctggctgtatatgatgtggtggttggcttggtggtgaatgggtagaggattgttcgtatcgagcgtatagcgaacctcgaccatttcacggacggatataatttccgcttcgagttgagaggttgtgaagcgggatgtatttgggtagctgaatattgtttcacaaatcttcgaggagattttatataatcggaaattcaacaggaggtaggtcacctgtgttgggcgggggaatgttgaaggtgctggtctttttaggtttgggctggtgagcagatcaacgtcgtcgatgtctgcgggcagttttacgtcttgcgttagagcctgctggtcgaggctcccaaatgctgtgttttggatggtatagagcatcattagtccggcccagacccgtcgtcgctcttctcgctcgattggcccgagggtaaaacgatctgggtctaaatggcaacccattgatattgcaacatgatgtgtgaatcctagcattgtccagatcggtagaccgcggtgaattcgggcgtaatttataagaactaaagcttgtaatgagttgatcgaatgtcgggacatcacaccatcggcggcgaggcaccgcaacgcagcagatcgatatcgtgctgacagcactttgatatttcggctgaccgttcgctctcgccctagatctgacagtagaggatggtcatcatcgagcgcgcttatggcgatagcaagaatggcgaatagcaaagccagccatgatgtagacacactgccaggatcatgacagaaatgctgatactcggcttcgaacgtcagatcgtgaagaatatggaaaacctaatgtgttatcagctagcgttcccccatttctttcatatgacataccgaggaaaagacctgaaaataaacatccttgagggtatcacaataccggccaggtggcagaatcgacaatagctcagcacgggatatacttccattcctcgccaacgggatctgcaaatcatcgtcatcctccgcgagatccgaatctaaattcggtaaacactccgcggcggggctattcgccactagagactcccactgcgaagctagtggcacatagcggacatgaccagaaggcgaagtacgaagtgtgccaacattatccaacatggggccgagcgagtcccatgtctcaggctccgagaaactacccgctgcactcgtcccacccagtggcgagactgcgccaccagtgggcgtgccagcatgcgaggtcatctgcttctggagcaaggcttctagattccgaattcgtgctagcagttcgttctgcacagtgctgtcaccgggcgaggactgctcagttgagagccgcggctggccgaggtagatgcagtcttcagcgcctagaccgcgccgcacgcatgtttggcatggccggccgtcgcgcgagcatctgatctttcgtattcggcaggcctgacagctgatggggaggcgcttgcctgtcaaacgggatgaggccatagattgggaagtgaggtcaaggatgcgctggactgaagcaagcgcaatcacctcgtcgtctgaggggattggagagagtgtgagattatagagcgaagaggagctgcctctcaggaaaatcgaacggccggtttcaaaaaggggtacttcgcaatatatgttgtgggtatggatcgattggttgtcgtctgttcatgggtccataagaaaatagggaatgagaacccacaatggatgagcgggggatattgatgttgtcagagttgagataaacagcggattatcgcagtcttctatacttcagcccgatccaatttgtaataggaggcaaccttttttggggaagccacatggggatgcgtgtgaatattagcggcatacttatttgcccctgtcttggagatgtcggccgagcagaaaataataaatataattattaccaaaaaggtctagggttcgacagccctggaggtgacaacattccttttacggggagaccgatgtatgaaacccttctataagggtgggaagggtccacgatcagagagttcagcggatatgtacctccgatgctactaacaaaatacagtatagaccgtaacagaccaccgggaccgcttagtcctaatagggctttgatacacctataaaccatggtttcgggccgacacccatgtcggccctttgaggaacacattgcttagcaccgaagaaagtacgaagatactacgatggaagtgaagtgtgtatgttgtatgtgtacgataccatcatacgtggatcatagggataactcgttcagaccgagatgtgccgttgccactaaacggggctaagccactcagcctgccgatcatttccccttgcactcggcttttcgtaaagatcggcgcgaatatggccacgaggggttagtgtggctttcctcagccacatgcgccatgacgacaatccctgtctagcggtagtgcgccatacttagaacaaccctggagggactccataaacgtgaaaattctgaacttttcagctcggagatatcaatgtcagttctagtggttcgtgtgagcgttgaattgtttatttttccttaatttctataggacccacggagagactggcttcgttgtgattttaccaagaatcactccattttgctgttgcttagaatattcgcctgatataagatcatttaatggaacgcactagaatattgttatagtaaagagcccttcctgcggctctccaattccatattcccattgtgcgaaggatcgtctgtgggctcggaccctccctcgtgttcctgtctctcgggaatccgataactttaacgttcaactactttatacatagtcactttgcagtaaaaactgccggcttccaggttgactccggggcaatccggtgaactagctagaaaagaaagagccaaaaaaaaacactacatggacacttcaaaataaagaatggaagtcaaaccaaaagtacgtggcaaacagtcccggatatcgggaagcatctagaagagccaactgttgcaaataatcacccgtagttccggctattcctccggattgtgggttatgcagctttgatcatcggtagagatcatcccgacgcgtggcgatagagtttctgaggcaataatatgctgtttaggcaggattcgacaactatgtcgtaggaatgtcaatattatattaccggctagaccgacaatgacagcatgtaattctgcatactcatcatcggtcgaacggcgaatggtaaacggcgaattactttgtaagtctgatctgttttagttccccatgcgtctggtggggaacccaaggctgaaacgggggcaagacacgagctgcgttccacaagttcttgctttgctttttaatttaaatacttcagcccaacaattgtttctgggtaaattacaaaagccacaaatttaatatccagtcagaagaaaggggttggaattctgctacttgcaacaaagtgaagaatatttgaataaatgtgcacttctgggattacggttgagatggcatttgtataagcgcctggataatctccccgaagccctgctaaggcagggagttcagactgcctttgctgtttcatgcgtcgatacatggctagattcaatgtgctgtgtctcgccaaccacactaagtgcacgcttaggtccctcgtcctgagccacaacccggtcaccgaacgcagcagccacttcttcgagagtcttttgcttggtttccctggacaaggttagcctcttaaattcttttgatctctttctcttcgtctccgatgaaacaagttgaagggaaatatattagcgacttacgggaagtaaaagtaagcgatcaccaagaagaatgcagagcagactacaaagacgtagtagtagttctcgtggatattggcaaaagcactgggtccagcttcggtgactattttcggatgaagaggttagcaattgcatatatagactatctttcacaagaatagatttcaggcttactgccaacattaacgataaaatgagatgcggcggcaagacccatcaccttgctgcggagagcaataggaagaacctcggcgccatacagccaagtagtactgttgagcatgccatctaagaagaagaaaaacccccacgttagataatttcttgcagccatggtccgagtccttacaatagcaaaccacaaagaggtaaattccgagaatcgcgaaaccctttccgatgtggttgtctgtattctggaactctctctgcatcaccgcggcgtagatttcgatcaggacaataccagccaatccggtgatcagcatcctgtagacggttagcagcaggcatgcgacatgataacccagggaatatacttacttccgacgtccccattggtcggtcatgtacattgtagtgaccgaattggacaaaaaggcgatggtaccgtagactgcagccagagcgaggatcgtgtgtgacccgattccaaggcccttgtacagaatagctgagagatatattaacatcccaataattcccgcttcggcgctcacaccctgaactcactttgataatactgaatgacattgacacctgtcaaactcgtcatcgtctgcacagcgatagagctaaacatccaagttagttccagaaatctcaaatgcaaccaaacaagaaataaacaaactcacacaagcacccgatgtctgaaaagtttaaagatatcccgcaaagaagtcatctccctctccatctcatactcaatctgcgccttcataagcccaaactcctcctccatatcatgcaacacaataccacgccgaatgcgcgcaaactcgctacgcgcaaggtcaatcttcccctggcgaatcagctgtcgcggcgagttaggcatgaaagtcgaaagaccaatgaacatgataattccccaaggaatttggattcccagaggcagccgccattgtatggggccgtagggagcgtagctgcaggcgtagccgacccagttcgacatcattgttccgaatgagatgccacagccggaaataccgccgatcagaccgcggtatcttggatccgatatttcactcaggtagattgggactgttgcaaccaggccacttagggggatgttaatttcgtttatagatctggtgaagagtatgggtggcttaccctactgcgaacccggctagcacacggccggcgaggaacatgccgatgttgacggaggcggtttggatgatggtgccgattgtcacgatcacgcacatcatttgcatgaagcggattcgaccgagtcggtcgccgatgaatgtttgtgttagggcgccgacggcttcaccggcgatgtacacggccacaacctaagatggtcagtctctgggtctgttccgttggggtggaggttaaatggctgggtgaacatacagctcctgtgacgccatttgatggcttttgcatataatcaatccagctttggtgggcaatcgctagtaaatccttagtttgagttgcaaagctagaatttgtggataataactcactagttgtggcaataccagtatcgaacccctattcattgaagtcaacttcgtggttgtacacggtccaagaccaactgatcttggaagaagaaatcaacttacaaacaagaacgtgcctatagcagcaaagaaagcaatacccagcgaataccacatcgccatcttgaataattctagattctccgcaggatcagatagggaagagaagagaagagaagagagtacgtggatatccaagaactagaaacaagaactacccccggtatattacttgatctctcacaggagcaagccgggctatatccgatgggccgaggatgcattacacagcagacagacaagtgacagacgacacatacgcctatactcggaggagggccgaggaaaacaatttctggggaagcggggaaactggggtaggccgtggatacgaggagtctccactacaaagaacttttcagggccattggcatgttttgagccgttgagtctcgcaagattggaagatggctggttcgaggctctcgtttggtcccccagaatacggggttggtgtcctcggtgaagatctgcatcttcatatcacattctctcagtttcggtataacgactcccggtccgtatgaaatggaggattcttgagaaccgggttcttggcaaccccctcgagtctcgcccttcggtgttttctcgccttgattctgctaagctcggatggtatattttgcttcctttgggaatatacgtggactgaaatatgtcgcccaggaggaccttatcaagtgttcggggagaccctgatgattgtgcagagtgtagtccatcagtgactagtggtttccgaatatctctttgacaaaccgtcagtaagctaactagaaaactcgggggtaaatgaagcgaggcatgggactttgataagtctcacgagatactccacgcataagagtggacccataaagggagtcttggcaagaattggggggatatactttgtaacccacgccgagaactctacatggggaacatggggaatatttgagtgaacatccaagagcacaatgaacagcaacgcgtgggggataaagtgtatcaccgctgatgagggtactagcagctctactgtgaagcaagaataattattcaacaactcataatccggtagtcatagatggtgattttgaatagttaaattcctatttcatttttccattgccaatgtcatatatgctccgcaaaaacagcgaagcactttgtgcaatgcagaaaacccagaagccgaacaaggaaactgaacaatctagaaaacaagggcagcacccttggtcttcttgtcaccactgtaaaagaaaaaggcatgtcagcactgtatagcgaaacagtcaagcaatatgtagatgtaacataccccaactcgaagtgcttgcagcgcttcagggcgagttgcttcttggccttgcaagcagtacactcgagacgcaggacgaccttcttggtggtcttggccttcttgtggaagacgggcttggtctgaccaccgtaaccactctgcttccggtcgtaacggcgcttaccctgggcgaagagggaggcctaaatcacaaaggatgacatcatcagcgatagctcacgactaccattccggtgtcgagggcactaaccttgccagccttgtactgggtgaccttgtgctgttggtgcttgtggcactccttggacttgcagtacgtccggcgggttttgggaatgttgacctgtgcggagagatgtcatgagcttttgtctttctggtctgattgtgcgaacaagatcaatgtcaatgtgattcgtgccccgaagtccgattcgaaattagtgcggtcgcaaagagataggtcgtgttgtccagtttgtagttttcaaggagtagaaagtgcggttgaataaaggatggcggggtgcacccattgtgatctgcttcctgagtcctgaatttcatcacccagtgttgttcttgcaggtttcgccgccaatttcctcttcgatgccaacttttacattgcatcctgcagtgaatccggtgaaaaacagacggttgggtagttcataatgtggtgattcacgacggtcggcgaaggaattgacgatttcgaggttggccgcacagtagacatcacacattctctccacgactcgagcaacttcgaatggccggggcttgcggaacacttgacatatctcgtagggtgtatccttaccattttgactgacttggccggatagctgggtggtggtcgttggattgtcgcttgtcggaggagagcaagtgcgattgttgggttgtgggatttcactcgcttaggccctatcgggtaggcgctaacccttttaggagtcgccaagaagagtatgctgagtcatttataatgttgatgcctgaggctttactgatctcactgatctcaaacgtgttttggagtttggagttgattctcagcacacatcttgtattctgctatacaaacccttctccaagtacaatactatcccctagtccataccaactcctgcctttgatcaattccaaccccttctcatgacctatcacccattgcccttgagacgggtcccccaatctcctccacatatttgagcggagttcatgattgagatcctcgatcctatcaataagttgaaactttttcttctcaaattcttctggggaatccggctttatttctttggggccaccaggcgcaataaagcgcgcaatagtgatatgcgcagaaggtacggtatatctagccgcgattggacaaccagattcagtcacgatgttgtaaagatcgcttcgcagatgatgatatgtgaattgatcatgtttcccactataatcactgatatcttcctcgccagccgcgggaacaaagctcaaagcaatagcagaagtatcgtagctgattactggcttgaccaaccgggcacggtgggtgagagtgtagtttgccagctctgctacgaccccgctcatcttgagagaagaagtaatctcatcaatttcaggtcccctgagtgcagacctgatctcgagcgtggtcatgtgcagatgatgcgggggtacaagccagagacctgtgttgtagaatcacagttagaacagtctctttgtattttccatgggttatgcatcgcacacaccaggtccaatcaaggtaccaatctcctgctggatcttgtagaccaaatcccgaatatgctgtggcgggcgtgcccaaaaggcaaggttgtgtctcgggtcaacgtagtctgtcaaccccttctctgcctcgagcactttggacaggatatcatcctcgttccattcacagaatcctttctggcaaatttggcttctgaaaagggcatttctattgcttctatggacctcataggcaagttgcaatcgtttctgggtgggactctcagcatttggctgttgagaattaaagacttaagcttaccgggtcattctcagaaacagtgatcaattgctggaattgattctccgctttcgcaatttgcccgggttcattggccattttttgggggttggactccggttgactagtgaatcgtgattctagcctgtttcagcggggtagttggggtaaaactgcatgcacataagaagtggaaatctatactatcgactttctggctatcaaggggtaataatagacggtgaaaaggattatagttcgcgaatcaatcgctagtcagtaaatatatttttcttttcattatatatttctgaactctgaagctcaactcatcttcgaaaacggtgtccgaatcaaaaaaaacatagtaagatatctcatcgttctcaaaatatcctagttatgttctctacatcaaatcgtataactacatagttacattgtcgcaagccaaagtgaggctccgacgcaatcaggcaataaggccacaggcccccaccaaaaccccgccgggctcacatctcctctctaaacactcattgacaagagctgtacctccaactacattgcagccgacatataccttgctccattactactatccaaaccaccgaaaaaagccaccgacgcttcaatatgttgatcaagtgcgtttctcagctccagcatgtccataccattgcatcatcgaatgaccccaaaatgtgaaaggccactcacccctagacttgcatgctgacatttcgcgtccaaacagggtccgaactctcactggcaaggagatcgagctcgatatcgagcctgactacaaggtaaaccacccgccttgaggcatttccggctcctccccgcacggaaccactctagcgttctaccgaatcaacacccacaaaccccgctgcatcaacgccctctgaatgcgcctatactgatacggacggttctattcaggtctcccggataaaggagcgtgttgaggagaaggagggaattcctccggtccagcaacgactcatcttcggcggcaagcagatgtaagaaaccactcactcagttatttccccctactcgaacaaacccaagctgacaacttttcattaatagggcggacgacaagacagcctcagaatataacctcgaaggtggcgccacgctccacctcgtgctcgctctgcgtggaggatgcgctgcgatgttggtgtaacatctttttgtcatttttagataccacatttctgcagcaatgttaatcagttgaggaactagtgcttttccatcccgcatcccattttgcgaggattcgaactgcagggaccgcggcggagcaatgggatttgagcttaaatggaaaggtagttgcatactgggtgttctgggttgaatgattttcatttattaatgtcctcttttttttcctcaaggacctaagctcctttcatggactggcttggttttgctatacccatcttgacactacttccgggctttgtagatctacttcagtatattcgcgctatgcggcgggataaagacatcagtaccgcttactatgttttgaaatgaagccctgaaagatgttgtaaaatagcctagctgactgagttctgaacacaataggtgcgaccagcagccttggttgcactctccgaaatagctcaacttgagaaagtcgaaggatttccagtcttttgtacgcctaagtcattcgcattgttgaagagagggatatagcttgtagcattggaaaatcagggcccatatcaacctgataaacagagccggagttgtgaataagaatgtaattttagttaataccttttataaaaaattaccaccgagtgaatcgcaagtggggtgaatcccaccccgggtatcagaacgagcctagactacctatgtcccacataggtatatacgtagagggcctcctttcggagagcatatgagcatatgaatcaaagtgatccaaatatcacgataaatgtcgtcgctttgccggcatgaaaatgctcggcgccgggcgccgacgaataacgcccgggcgggaaagaggaggcccggaggaaggtgggcgggaggaggggagagaagaggtgtgagaggcgggaagagatgaagatgaagaagaataagaagaagagggtgtctcggcaccacgaaggggggaggtcggacggcccttcagcttaggcatgggctcagtggccacagctggcgacttctttacgctagacgaatcgccattggatgcaccacggggtgaggcggtggaggcggtggaagtcagtgcgcgtagtcgcgcctcattcttgccgagcatggggtgctgaagtgagggtggaagcatgccgggccgccggctgattcgtgggggaagaggttgcgcctttgatatcggctgtggtgccggctgctcggcggggcggcggtgttcttcgaccagaccgatcggtgcacgcttaacttgcgacgcacggttgttgagggacttggtaggcatcgtcagcgcagtgttgcgtttctgcggctggaagatactaggcttcttttcaacaccaccgcctatcctgcgatcatatggagcatgacgctgtcgcacagacggtcgggatccggccatgcgcaagcccttgctctcgggtatgagtttgggggtgaggagtgcacgctttgcactgatgccgtcaatcgccatcttcattctctccgcatcggcatcaagagaacgttggacttggtcgcggagatcacagtaaaccccataccagttgttggtactatccgggaggtggtacttttcccactcaggaatgtcccgtttaatgagctcaagccacagttcttcgtcttcttcggcgaggtggggggatgcgagctccataacatgctacagatttagaaagaatgatattagaagatgagcttgaaactgaaaatgaagcgcgggtgaaagaatagttagacagtgaggtctagtagacgtaccagcttttcggggttatggatattaagcaaaataggacgggcgagtgagtatggcatggcccccagattatccaggtctgaagatcacacatttagtccggagtcttgcaaaatgagagagctcggttcatctatacctttgatgaagcggatagccgtggctgtagccaggtgaagcagtgatggggctggcattttgcttatgacggcaatggttcaagccgaattgggtaccataagatatgcgacatgaggtgaaagcaagtactagatataacagagtatacgaggcgcagtcgcattcaaaagaataaaggacagaccaaaagatgccagatgcgacgcgattcttgtggttgtcgatggtaggagtctcggctttaaataaaaggatgatcacgcggtcgacgctgattggctgcgtcgattcgttgcttcatttgatattctttgttctaatgtttccaagccacagctacggactctactgattgaatattcgtaagatctgatgtctgctcaagtgagaattgatggcctgcatcatcaagatgcctactcgaggaattcaggcttcattttgtcgttactcgtgaatcaaccacaacgacgacgctatctcttgtgaatctcaaaatcaacctcgttgcccctaggattatgcaatcggcacacatatactccgtagcaaccctggaagtaatgtcagatgctttagtttatagtacagacgaaaccttcatttatccatttatacgacatctccagattcacaaagtattgggaggtcgctgaaatgccgaccataagctcttttccctttcgaagcagctttttatattccagcggcttcttgcattcattctgtagtgtctcggatccattgtcttcggaacttgtcgttgtaagcacgtgatgtccagcaaacaatgcaatcatcatcttgatagcatcatcgaggggcatttcaaagaactttgagaaatcgaaaatcagctcaccatatcactaaattctgcctcagatacgactcacaggtacgtctattatggtatctgtttctgccgtgatgctcgtctatatacacagtgcctcgaacaatggtaccagcaacgctagtcgtactgctatcattcgagcattccaatagcgtcgattagaacatacccttctcgtcatatggcgcctcttttggcaatatcatacaaggcctggactcgaaacctcggatacgtctgacccttcacacagataatcacaatggcaccccgttcgcagctcgagatcaccacttcctccgtgacccgcttggtcaaggaggaagcttcttatcacaaggagcttcagcagcaggctgaacgtatcaagaagctggaggctgataccactggtggcgacgagaaccgcgagtataccctgaaacaagaggtatgtgccttgtacatgagctttgcttccaccatatcatcttgcctctaatgctgacatgaacgatagcacatgtctcttgaagagaccaagaaggttctgcccacattgaaggagaagattgtgcagaccgttgcgaacctggaagctttgattgtgagtactacctatctgtattcttggattctattaaccaaatttgatagatcgaggagggcaaaaagggatcggacagcaacgttgagcaaatcaccgctgccaaagaagccattgctcaagccaagaccgcacagcgcgtgatttcgtgaaagacatgtcaattacatcagagcaaaaaaaaaatacccataaggtggaatgattccatagtatcattcaataaattgaagccatgcccaacgccggaccaaagaccagaactccttgctagtgctagtaatgtacatgccgaaatgcatcttcaggtagtatccatcttcccgctgaaatcgtcggggagttcctctccttcctcgagctcggataattcgccatcactaaccgcagaaatttcaccctcatcaagcatattggtatcctcccgtgccccatcgccctgagcagttgtgacttgccgcaaaggtgacgcagcaccggcagccccgggcttctgaacctgcagaccagatggccgaccggcatcgtcttggccgtgttgagagggggtcatggcatcgttttcaggtccaggaggagtgtttccactgctagccttgcccttggatgtgacatctccctcgtcgccgtcttcgccctcctgcatgccttcccggcgctcgacttcctctttctcatcgcggatcaggcgacgaagttgcatcccctcgtccacaatacgaccgaactgctcacggcgctcagcccaggtcatcgcgtaatccttgctttccttctcgagatctgcaatctccagccgtaatttctgaaggttcgccgactggtcttcgcgcggcttgagtaggcggttgctcgtgattttgtccgtcaattcgtcataggtctttcgcaaggagagaagtcgccgtgcctcttcaagctgagttcgtagatcggccgtgctttctcgtacagactgcattgtcgacagaatctgaactcgctcggtagcatatcgctgtcgttcttgctcgttgctggtaagaagaaattgcacgcgggcaatgctgccctcaaaggtggcaaagtcgagtgcgacatcctcgcgaaagtggtgccattcttcgagtcttttctgtttctcggcttctgttgcggtcgcatcggaatcggcgtcggtctcttcggggggaggggtgagagggagcgaggatcgcgagacaatgagggaatcggggttcaatagtcgttttgagattcgcttgaatggcttttcttcgacgttgaggagacgcgacttgtggagcgcatctgtaaaagctgggccgttaacgttgacctgggagaacagagctggagtggactcgaccttcttctggctggcctagcagcccgtatgaagccattttgtgtatctgaatatgaaattcgatctcagagtttaataaagcaggatatatgtattgaaagggtgcacggcttcaagctgatcgaagcggggagggatatgaaaagtgaagccgagcggtctggcacttaaactccgccttaaccttattgactccagttaatagccatgattcaaccagttgtgctgcataacaggagtaatcgactttcttttacatattactcatagcccccgagcttcttggctagagaccatctcaaacctacccagaatcgctcgcgtgcttacttgaggatcacgctgtactccgcaatcccaagctgtttgcaagcacgacctggtgaagccacaaccagagactcgatgaactttgccgcgcaagaatctgtgactgctgtcctagctactgatatctttctgtcctctgtacgtgtctcaggttcatcgctatgacggagatgtattccggcctccatgtgggccagcggttttgctctctagaagagttcaaaacagtggtacggagcatatcagtgagacaacactgggagcttcgtgtggtccgtagcaacaagaagagcgtggttatcggatgtcgatcatcggcaaattgcttctttcgtgtcgtctgtcgctcgaacaaaaatgcgacctacatcactagtcttcaagacagccatagttgccgtcggagtgaaaattcccctgaggacacgccagctcgctctgaagcttctcatgtgcgatttctgctgagtgagatcccgaagcttttcgatatgaagtcgaaaatacgagcccaggacgttgtggatgctgtaaaacgttaccatgggtatgacatatctctgcgccaggcacagcgagcgcttaccaaacttcaaccacgacatgctgagggccaggatgaacatgagctgaatatcgagatgagtacggaggaacgacagtcgcccgagcaatcccccgagtcgcaaggggaaggggtacacgcatatggagacatatctgagaatcactggctttccgagcatatcgcatcatcatcaattgatgatgataacgtgtccccaatcaagacccccaaaaaccacgtacttgctccaccatctagttcccaagccctgccatctccaccccaggtgccacacgtacatattcccacatcaaaccaaccctcttttaatcacagccaacatccaatgtctatacaaacaggggcacaatgtcagaccgctgcctctttaccagtaggaatggctgggcgtccgaaagactaccctgagcgcagtgatcatgatgccgccccccagatggttcttaccaatttcaagattgaattcacctgcacaacctgcgggtcactgaatcagagcttcttcccaaaccagggcaatgtcaccggtgccagctatatggtccatcatgctgtaccgagtcctggcattatcccaagacacgggtctactcaaaatggtgttggtggcagtagcaatgcagtcggcgaaatccctgcttacgaggttaatgcttccaacacatctaccattcagaatgcctggtctagtgatggcctaggggttcaaattggatcggcacatacctaaaatatcatgttaagaggatgacatcggccaccgtgttgctgatattggtattcattcttgcacgctacaacctgagccaacacgagaactagctgactttactcaatgtatggtatttgatgccttggccgttccggtctcagaatttctacacgttctatgagacgtcaatattagaagtttggatgcttaatccaggacacgatggcaaaatctaacttaactctgaagagggttagtttgatgagtcttttctgggatctctgttttgattttgaccctgagatctctatattggttcctcttatgccgaggaagtaatatccgagaatgacctggggctggacgatatcatcagggctaatattgttatgaagtcaacgagctacgccgtttaatcttgttttgataccacctttattgaggggcgaatcctatctgcttagttctgagaccatcggctaattgcattctgagtacgttccctagaacaaagtttcttcccccatgcagagctggacgaccttgcgcaaacccgctctccccaattggtaaaaacgagtagaccatggtgaaattttgaactacttagataaatttgtggcgatgttgatagaggaagagagctaggctatagaagctatatcaaagcccaacggcttgccttcgtcaaaaatgccctcggttatggactcgcaaagagttcagcataggcggcggtgtgacgtcgctaaaggtacatatgcgtctttcaaataataataatagtagcccaattggtcaaagtgaccacacaataagcgatcaagcagaaaaatagtggcgacacttactgcggagaaatatccggagataaaggcctaaattcctagattcggtaactagttagtcagccatcggaggtccgatcggatatccgaccccacggatccacaacagactctgctcttcgtcaaccgcaccgacaaaatgttacggaattgagccaacagtgtctggatcgccattcatcggggcgatattgggctacaatgaaaaccaggcacacagatactcacttgcatcggacgtggatccgatatgacatctgccagcggcgctcaagctccaatcgctcagttgccgatggatcgaaaggcactaaaatcctgccagggaaaaacttttcttatcaattgaatgactcttatatgaacagacttgccgtgggattattagcttatttctttaaataacattaggaccctcctcattccatacaattgtgcttcggatagtataacgccaagcccctaccaaccttaatatactccgtgtgcaatatcttctacacttcaagctccatggccttttacggaacatctcagataatctaagggaaattacctctttgagcaagcttggcaccgctacatctgcagccatgaatcgacaacgagaggccgaaaaggcccttcacgaccaaacaaatattctccccttcgcgcaactcatggttgtcttcacgggccttgcaatttccttgctgatctgtatggtggatcagaatggcatcagtgttacactaccaacgatctcacgcgagctgggtgcccaaaacaccatttcctgggctggaacttcgtcgctaattgcaaacaccgtgttcaccgtgctgtacggccgactatcagatatctttggccggaaagtcatgtacatctccgcattggtcttgctgtgtattgcagacctgctctgtggcttgtctcagaacccggctatgttctatgtcttccgaggcctggctggtgtcgctggtggtggtgttacctctctgacaatgattattgtctccgatatcgtgaccctagaaaagcgaggcaaataccagggtattctaggtgcatctctgggtcttggtaatatcattgggccgtttctgggtgctgcattcatcatgcgttcaacgtggcgcggtttcttctggttgatttctccattggctgcttgctctgcagtcgttggatacttcctcattccgaataatgcacgcaaagataacttccgtgagaatattgggcgcatcgactggttcggactgctcgcatcgtccattggtatcatttttctcttgattcctatctcgggtggtggatcctatttcccctgggattcaccgatggtcattagtatgcttgtcattggaggttgtgcaatcgttgcatttttgcttattgaatggaaagtggcaacacttccgatgctaccaggtatgttttgatccccccatagtagtaaaaggacatccagttgacataaaacagtggtcttcttcaaaaataaggtcatctctgcaatatttttgcagagctttctgtatggtgcagtctaccagtcaagtctttactatctgccattgtactaccagaatgcccgtggctggtcgccaattgcctctgcggccatgacatgtcccatggttgcggcccagtcaactttctcaattgcatccgggctatacatcacacgagtaaagcgctatggtgaaattatttggattggatttggcttgtggactttgtacgttgatcgatgcctaaatgctcttactttggtcccatactgacgatatcattttcatagggggtcgggcctcatgttattattcggtacccacacccatccggctgttattgcagtcattgtggcagttatgggcgccggaattggcttcacattccagcccactctcgtggccctgcaagcccattgcactaaatcccaaagagcagttgtgattgcgaaccgtaacttcttccgctgcattggtggttcatgtggcctcgccatctctgcagcaattctccaggctgctcttcgctctaatctaccaaccaaattcgcgtacttggcagagtcttcgtactcacttccttcaaaagcgaacatcagtgcaactgagtgggcttcaattctgctttcttacagcaaggcttcccacgcagtattcattctgcaagtccccgtcatcggtgtatgtttcctggcatgtattttcgtgcgtgacagaggtctggaacgaccgaaagagccggaagagcttgaggaggaaaagcgaaaagcccaagagagagatgccgaggcggttacttctgaatatcccgaggagtgtcttgagacataccaccaggtcgagaagcgccattctgcgtcaacattcgccgaatcatccatgccgccttcccgggcggaacctaatactgagggatatggggagaaggagcagcattgaggcatgtactaaagcatatagggatctaataactctttgatttggctagatctggattttcttgggtggcgtgtgataccaaaaagcaaaaattttgtatagtttacgatatattaatataatacgagcatcaattggcgcttatgattgtccgagctacggagtcttgatgtcaatattgctatctggtaaactggaagttgtaagatgtgcttctgattgcttcaacccttcgaaatatctcttttatcacaagtagtaaaaccgcagaaaacaaagaagcaaaaagttcgggtgtttatcctagacgcctcgtaaactataggctagccttgatactaggagacgtcttgtcttggcattccgatccaacgacatctccgatctctttcaatctcaatcgcacctacaatggcgcttcaccggcatcttcatgttccaaattaaagctgatattttccagcaaatccgatatgtatgcgcccgggcagagctccgagtcatcaaggcagacaagtcccgtatcgcgagatcataacccgcggaaacgcgggaggacggcatgcactcgctgcaagacacggaagcagaaggtgagttccaatcggtaagatgactacaagtatctcgactaacggcttgtagtgcgacaacgaatatccgacttgttcgaactgcttgaaggcgggtgtcccgtgcgacaagtccagcgtccgagaggacaaagaccgtcagaatgagtaaggtccaagtatatgtagtagccgggaaagaactaatttggataccagttacacacgtggcttagaggagcgtgtactgtttcttgagcgtaaacttgtggagtcggatcgatcatcagacgggaataccgctacatatacggcgtcttcgctgttctctccacaaggtggtaacacaacgccacacacagctacctctggatttgacaataaccccgttggagaaatcgtgggccttcttgccctgagcggctctgaggcccctgcatacgtaggatccagttctggtctttcactcgctgccgatctgggagagatggtccaaacgagtgtatggaaccaattcatctcaagaatgcaacataaaactaccgccgccagtagctctcgaagtaaggctggccaagcacacgggccctcggagcagcccagcgccactcaaattcgagatcggacaacgagaatggaagatctcttgccggcgaatgttgaacctccaactgatgagatgggggcaagaatactcgaaacatatttcacccgacttcattctcgatatccatttcttaataggaaacatgtatggcagattcatggagatcgatggcgattagcgaagatcaaacgtgaggaccttactcggtctgatcgatttgctattttcaaactcaacttggtctatgcaatcggcgcaacaatgcttcggctgagtgagaaatatgcgtacacgactcccgaggtaatcatattcattaagcgttaagactggccgacacttacaagttttagcgattctatactgccgccttgcagcatgttcccacgatgtgtgaagcacgatcgattgataatatcgaggccatggttcttcttgtcgtgtaccacctccgaactgcgtccagtcatggaatgtggtacatgattggacttgctatgcgtactgctatcgatctaggtctccaccgaaaggcaaatgaaagcaatctggatccatttaccactcagatgcgacgaaggctattttggactgtatactatttagagcgagtggtatcaatgtctctcggtcgcccgttcagtatatccgatcgtcacattgatcttgacctcccactagaagtggacgacgacattgaagaccccacactactcacagcacccctagatccaaacaagaccacaactttgacattcgcaatttacctcttcaaactccgtcgcatcgactcccgcattcaacataaaatctaccgcgcagaccgccccctatcttctctccgaccaaaaatggaccctctatacatcgaattggaacaatggaaagaatccgccctattacgattcagcggtccagatctcgactacccaatgctgcacttcaaccgagcagtccgactactaatccagccattcctccccctcctcccaatcacggacccatactaccaaatctgcatcctggcagcaggaaacatatgtcaatcccacaaacgcctccaccaaaccctggagtatggccactccttcctagccgtgcaaacagtcttcatggccggaatcaccctcctctacgcgctatggacacacacagaccaagtctggtccgtccgcatgagcaacgacatccgcgcttgctcaacagtcctctttgtaatgggcgagcgcgcggcatgggtcaagaaataccgcgacgccttcgagctgcttgtcaatgccgccatggagaaattgcagggcaatgagactgcccgcaatgccggaatggcggagctgatgacggcccagtatgggattaattggaattctactactgctcccggcatgtcgggtagtgataagttccccccggtcaacccgacggggctggctccagatactgcgggtgctacgccccagccgcagggttgtccggctgatgattccgagcacgcggttaggatggcgttgcagctggcgccatggattgatcaagatgagagtgatcctctgtgggtgccggactttgagactttggagaatctttctgggactttttggagtcatggtgatacgagactctttgactctatgtgatgtctttctggaccgttcattgtgcaactttcctattccttctattatgcccatgcgagggatggaatatgataccctatattatgatataataggacagatcgcattttctaagatctgcccatcatggcgtgggggcttttccatgcttgtttcgtgggacttatcgaataataagagttggcaaaatgccagcccctaccccaattcaccgatgaggaaattgagccagtaatttgaaaatacattcgacgaccgactcctaagctcatttctatgcttgtttggtgtctggtggtgttttgcgaagtagtcgaccagcatcagtcagtctggtttatggcccatattgcatgtttttgtagaggaatttacgttcatgatgtgttcaaggcggtatatctgtgaaccaacctgcaagatcaggcaaatcaagtctcccaaggaatccaaactcttcctgtcccaaacttatctcatcccaagatgtaaaaggattgaattccatgttattgggttcgtgacggagattgtgttcgtctgatatcggctcagtaggctgcgatgacaaatcaagtgggttcagttgttgattgtccctttggtgcagctgagtggaaactaacgaggaaacaacaccaggccgacaagtagctatacaaaaattagcctgtacccagtgaagatctattactaaacaacaaacccgagtagttttgcattatatgttggtgcgtcacttgcaagaactgcaacgagttgcgggcagagagactgaacatggccataaaagctaagatctcttcgcacttgcgccaactcgcatccacgatttttgaatctacctgctccctaattgaatggcaggaatatgacattatcaggatgatccctgcagtggatgtgtctagcagatgttagttgacgatgaataacaatgagtggaatcgatcacgaacagaacccattgtaccaccatgcatcagttacgcttgttcgatatgtctcatgaacaagtgagaccagatctatggctgccatgacgcatgaggaggcacatttcgagaagactgaggagtatattatatttttctcgccgagctgtacatcagagcggcgtgatgctcgctcatcggagcagagttgagtaaacatggggcgatacaatagaaggcggaggtgaatgaatctaatttgtttttcttttagtcagaaattgtaactcaaaatcctagagatagaaacaagttacctcgcacgtaacacattctgctgacgcttgaaggttgatgcattgccaatgcctgagcgatgcaacgaaggttcatctgtccaattcaagggctggggtacgttagcctcataagcagcaagtttgtcgtcgagctccatcaacacatccaggctacaaagcttggagcttcgcagcgaactagtgcgagtgctatttgatcgactctgccaagcgttatagacctcggatagaatagactcgagaattttgtataattcaatagttgaaatgtggaacgtcatatatcccagcttatgatcgcagggttgtccactaagctcacaaggatcagcttcttgggagtccgttcccattgcaggcagaggcaacggtgaaatatgagaggtcatgctcggtctgccatgtgtcatgctaacaatcctaatctcatttgttagctgtgtgtttaaaaagaacagaaaagcgattgcacaaacatatccataatgacgcagctatgccatgttcgccgccgtatttctatttccagaggcttgttcgaggaatgtatgattgtctcgtgtaatccgagtccttgaccagctcgacacgccattccaactgcattccagcaccgattcggataaggagtactttgaagaagaagtgaaacaatcagaaacgtttgaaccacgccgatagtacttatgtccagaagatcaagattcacaaatcgctttgagcgaaggaaaaatgaataaaccgcagcctcccgatccgcaggcggaatatccgagaaatagcagccaatggcaaagatggcattgagtgcacaatggaagacaattgaattaggaccgcaatcaaatgcgcccccgagtccaatattgagctgtggcaactcaggcttggatgccttatccgattcccagagatttttatacgcttgctcaaaactagggcgatggaaaaatggaaatagacaatgtactctgtccaagtaacactcaagaagatggtctgccagagatcgagggggcaaagagaagtcgtcgaaccgaagatctaccgatgggtggcctatatctcgccaaatccccttatcagagccctgggatcttgacgattcactcttgttgcctcgcaaagctgacatatatgactgcaatggcatcgactctcctgctagtcgcataaaagaggccactgaagagttcccatagtattgctgctcctgtggagagtctgtgcctgggtcgtcttctgcgacagatattgcacccatggcggtgacattaccgtgggagttgagagacggcgaagcatatatgctgcctgctcgtgggtgggcagattcaggagacagatgtgaatgtgccgcatgtggggatctatagcgctcagcttccggtcgattcctcggcgtggggattcttggcggttgaaaagtaggcgttgaagaagacagaggacttggtccagatggcacaggggtggatcccagtcctagtaatccttccgcggcaacagatgcccttgattctacgtccagatccatatcttcaccgacaaggctttgacttgcagatgcccggtagtttttatgttgcgaaggcccaggtggcacagcaaccccgcctttcgcgcatgttgcttcaagctctcgaatacgatcatggagaatcttcaggtattcatcattgctggcggaccttgcattatccagcttgtaaacacattggtcaacagtatacgagcgtcgagcgcaggggccacaaattggcttgataccatcgcacctgacctttttatctcgacaagactcgcaagccagggcaatcttgcgacgccgcggtggctcccgtttattaattccacctttgggaggcatctgttcgacaagttgtcctataagccacagctgagtgtatgtgtgacccacaatattgctggtacacaattttattggtgacccgggtggtgaccggaagagaggagagaaaagcagtggaacaatcccgagactgttgttgtccggaatgtacccggacatatagtcacgtgtcataccccgcgaattaggaaaaccaaacactacgtccactactccgtagttacaacagagataaacacgccgattaaccctgagttgctataattggagtccttggtcagaattgttagaacggacaagaggaaggtcctaccgacaacgagatactgctaccctaatttagcttatttgtgtcccaattaggggtagtgattgtcggtgtcggcaggacctgtatcagacgtggagcgggatgcacccggtgtgtgctgagagatgaatagtgaaagtaaagaataatagtactactactccatcaatactccgcaaatatgtgcatatacaattaaagagcatagagaaaaatacagtaagtcaaattaggaacggatgtttcgtagtagaggacgcggatccgcaagtactatcccgggtgcatcccggaattgacgagggctgcctcattattaacgaggaaccttgcttgactgaaatattaggagaaatttgaccctcttcacttcctgaggtctctctttgattaaaaatccaaaatcaagtactgttacatcgtcttccacagaatcctaaaccaatatctaaaacccaaagtacaacatcggctggatacctgattatctttcacaattcaaacagcccattaccagtttggtatttaccacatctccgaatggaaaacgccaatcagacgattcaaaaggactatagtactctttcacattactgtccctggcaagacgacagacctcaaccaatctcccgagaccaatggcccgccgaagaaggtctacaatggggttcagatcccagtttctgctatcatggcttctctagtcccataggtacatggacagaggagcgcctggtccagaacctgatgcggaacatggctggtttgtgtaccgccatggacattgactttgatgttcccgaaagtatacatgagccatctcagaagaatctatcggaactggatggattcacactcccaatatttcagacctcgatggtcccacaaaatggaagaccctccgaaaccccatcgccatcttcatcctcgagccaagcccaaatgttctctttggatgatactgaatgtacacaacgggcgagctgtgtcaaagccagaacccagtccaaacaaaggaaaagaaagtgtgtgcaaaggccaggacagaatttatgccactgccgatcggaaaagaagaggagagagatcattggagatcgatataaagaactctgtcacattgtgccagggcttgagagacagtcatacacgagaaaatatgttctcgaggaggctgcactgtggattcaaaaattgattcaggacaacgttgcccttcatcaacaactaggggagttgaaggaacaggaaaagttgactcagttgaggttatttcctgtcgagaaagacgaacaggtgggctgctagtcctagcattatttttatctaacaatactgtcaatatctgcgcatgttcatttgatacctcacggaaccgagcactatttaatgtaatatgattagaggtctttcagtagtttatgttcgtgctatatttataccttaaacgccaggccattctctatctcactggtgttagttgatataaagaggccaacttctttctaggtttactattcactcttcatctctctctttgcctcttctttctcatcctctgtatattgaatataccatgccctagaatttcccaagaacatccatggcttagtgcctaccaaggaggagcaatggcagcaatccctttacccaatctctgaatttgcgcagcatagtacgtctaccaaactcgttagcaaaccgcctaaagcacccaaaagcaaaagaaaaaaacttacgctctcagccccagccccaataagaggcaacggcaagaaacgtgtataccacggaataggcgccttattcaagggcatccgcgcctcgtcgtcgccgacactctcatcaagcaacagacgcgggaacttcggatcaatagctgcaggccgcccaataccaacaagatcacaagcattatccttaatagcagcctctgccccagcacgcgtgcggaacccaccggtcaacataagcacaagctcaggatggcgctgtcgcacctccttcgagaactcgaggaagaaggcttcgcgcgctgcggtgcgtgacgattctggtgctgccggattggctttgccgtagcccatcatctttgggtcttcgtagctgccgcctgagatttccatgaagtcgatgccggcttcggctagaagtgcgatttgcgtcattgtttcttcgaagattgtggagctgtggtcggctgagtttagcttgatgccgattgcgaaggtcgcgggtacgactttgcgtgtttgagagaggatctctaggacaaagtgggcgcgcttttcgggtgtgccgccgtatgcgtctgtgcggaggtttgtctggggttatggttagtattggtgttgggctggtgataggggaaccgagtgtcataccttgccgttgaggaattgatctaaatagacgtaccattagcaaagaggttatacatttttttttaaaaaaacttaccaatcaaatacccatgcgcaccatgtagctcaatacccgaaaacccagcatccgccataagtctcgcggtatcaacaaactgacgaataaccctttcaatatcctgagttgtcatctccttgggctgggtccagaccaaacacccaatcagcttctcaaaatagctatctccaaccttcatgggcacggcgctgggcgcgagcgtctgcgcgaatattccgcgatgacctgcaaggcggaaggactgccggcctgggtggcagatctggactatggccggcgtgccgtgcttttggcaggtgtcggcatatttcttccattgcgcgacgagggagctgttggtttcgctgtccttatattcgctgtgtagagcagggtcgaagggactgcccatgtggttcacgtcgacttgcacgtttcctgctaagatgttagggttgggtgtcctttgggatatgttttgacagtctaggtttcgcgtttggcatagaagtttcgaccacaaaatgggagaattagaccttacctgtaagaatcatcccccatccaccgtccgaccattgctcatatgcatcaaccagggcgtttgtcggctggttagttttggcgatcatctcagccattgcggcctgggagatattagttccatttgtgcatagccgctaggcgtgaataacgtatgtgatttgtaccttgcctagcctattcggcagaacaagcccacaagggagcttgacggggtctgcgaggggagatggcatggcgtatatgtatcgtatgcgatcaatatatacagtgtaaggaattcagtctaatgtaattggcgatatagatgaagtctaacagacacaaaacacgctgttaatgacgttagtctcaatttgctcgcaactcaaaacgcacacatacctctattccagaacaagaatctgcaaaggaaggacaacagacactttcatcaatttgtaactaactagttaatgagaattagctcttagtcatctcgcggagagattgatctccccgtctcgcattgtggagtcttcaggggccgaggtccacgttgaagaaatgtggattgggaaattcggggagttgggttcatccgtcctgaattttcgagtctgcttggtatatttgacgctcagtgaggaacgccattactaacttagactggaacatgttgcgacctctacaggtgttggcgtaaagttgtgaacaagctaaatagtaggataatagtaagtgatattaaattttgttcattcatatggcaatgccagcgaaatgctaactattcccaagatgctaagacccccaaaatgcgagccaaaaaccaaaggaaataagtgttgggtattcaatcaggggaaaagaagttcgtgtccaacctgaaaataggcagagaagaaatgtaagaaacgaagtgcgctcgaaaccaacaaaagacaaaaggggggaaatatcaaaagtcaaaggtgacatgcgagtccatcacgcagagatcctaagcgctgacatattcgaacagatgcttttttttctgcaaaatgcagcatgcacagccaagtctaggacaaaaacaaaaagatcaaatcttacaacttggcattcttctcctcagttggggagccagtcgccgtgatgggtggcgagatcgttcctagattagagaggaggtggccgacctcgctctccagagcacggacctctgtgtgagggtcatacatgcgggccttgatccagttgtccagctcggcgtcgcccatagagcgcagcgcaatctcgcggtccaccttgtcctcctgggcagcgcgcatcaccttgcgggtgacgacgacactgacctcgcggatgcgggtgatatcggggtagagcaggccgcgctcgagctcctcgccggtgagggcagcggagagggcctcgccagaggcgtagatcatactgtctgtgacgcggacggccttggacaagatgctgcctaggccgataccagggaacacgtacatgttgttgccctggccggggtagtaggtgcgggtctcgccggcggagttggtgaaagtgtagttggggaagggggagccggaggcgaagaggcagcggccgtcggtgttggcgatggcagtctcaaagtcacactcggactgagaggaagggttggagagggggaagatgagaggggcggtgttccagtcagccatcttgcgcaggatctccggggtgaagacgccgcccatggtggagagacccatcaggatggagggcttgacgtagtcgatgacctcttcaagagtcttgtactgctcgccgttgttgtcaccgcgggcaaagtagaccttgtggtcggcgagcttgtcaccgcggtcagcggggggaannnnnnnnnnnnnnnnnnnnnnnnnnnnnnnnnnnnnnnnnnnnnnnnnnnnnnnnnnnnnnnnnnnnnnnnnnnnnnnnnnnnnnnnnnnnnnnnnnnnnnnnnnnnnnnnnnnnnnnnnnnnnnnnnnnnnnnnnnnnnnnnnnnnnnnnnnnnnnnnnnnnnnnnnnnnnnnnnnnnnnnnnnnnnnnnnnnnnnnnnnnnnnnnntcaccgcggtcagcggtgacaagacccttggtgtcgacaaggtagaagcagttgcgggcttcgtcctcagtcatgccttcgcgcatgaagaactcgacgatctggcgggcgacgccgacaccggcactgccagcgccgaagaacacggcacggtggtccttgcagggcagaccggagcgcttgacagcgttgatgataccgccaaggatgacagcgccagtaccctgtatgtcatcattgaaacaggtgtacatgtcacggtaccgccgaagagcagggaaggggttcttgaaatcctcgaattggatgacgatactagagatgcattgttagtcgcggtttccatataggacatgtgagaatgagtcacttacccgggccagcgctcggtaagagcagccatcagctcgtccaagaactcccgctcctcctcgggtgagatcttctcgcggcggctccccatgtacagcgggtcttcccggagggtcttgttaccagtgcccagatcgagagtcagaggcagggtgacctcgggacgaatacccgcacaggcggtgtaaagcgccaacttgccgatggggatacccatgccgttgatgcccagatcacccagtccgaggatgcgggagccatccgtgatacatgtgatctcgacgctaggttcaggccaattggcgatgaccgaagccagattcccgcgatcttcccagctcaggtacatacctaaaacgagcgttagcgtctccggttctatttcgtgcggagaagatgccaaatgcggagaagacctcagttatcgctgatacgtaccttcgggctgttggtaaatctcggaccaccgttggcaggcctcgcccaccactggggtatagatcaggggggtcatttcctgcagggattatggttaattttcgtcgccccaagatttcccggcccaatcacgtgtctcggtgcttgacgtaccctgagatggtctgtcaccagacggtaaaacaggtgcacattgttcttgcgcaaagtgctaaggtataggaatttttcgataggtgtgctcttcagacccagctgtgccaggcatcgggtcctttgcgtctcgtagctctcggtgcgaggaggcgtgaggccgtaggtgcggaggtacttgcggatgtatgcagggttggcggtatcgaagttggcgttactaagaactattagtgactgctttcttcattacaagcccgagacaggtaagctgatctgggtggacatacgcaggcaaggcatgattcacaaagggagccgaggtggtatgcgcccgttgctgagaaggatagggagccattgtgattgactgagaagacttcgagtttggggtagaagtggaatgatagaaagaagaaaaagatttgggagcagatgcgagtctgtttttatgtactcgagacagcatactaagattgcgctgggatgttcgtgcgcacatcatccaggagattccgacagggtgatgaccagataaataaccgggaccgcgtgtcaaggcgacacggtatagtaaaaaaataagagtcatgacttgaagtcggaaagagtcggacgaaggagagggtcacgacccatgtggattcattttcggtgttgacagcgaaccgttgtgcatgaaagccattctggaatctggatccctccaaaagctttttcgttttgctttttttttcttttcttttattcgggaagcagatccagcaaggagaagtgtatcaccgtgtggggaccgggggggggccgactccgacaaatgcggagatgcagtcaaatcagtgttgaatatggaattgaaagggcagaatcccgagttattgaatgagacacataatttactatggaaattacttggatgatcggtgcgggatttactcatcattccagccttgcggaactgcacctgtttgccctccatcctccgtacatatcgatattggggacgtgaggggattgggaaattggagtattcggagttggacatttacaatttacacggtagacctcgaactggtgacagctcccaagcagaatggtgactaaagaaagactgtaacctgattggctgcaaaagccggggatggaaacgccatcggtccaaacccacagctacgagcttctagagccgcagatagtgccgaagtggagtccaactctacccctaattgattctattcggtgtttgcgtttctcgtggaattgggatttcctcttgatttgaacttgagcgtcttcgacggtttcgagaaagcgatcaaatgccatttgagaatagaaggcggaggtcggcgacggagattgccgctctcaaaggtcatatgttgcgcacaaaacatcgctagatctataagataggaaaatgatattcgctgttccgatcggaagctccccggtgagacttttaggcctctgtttcgagtccgccgcgttggcgatgatattcggccttgtgaatggctctcggtcgccgacagagggatttttgattacttatgttctctagcacggttgcgttatttttatttttatttgccccctccaattcttcaattgtcaggtctggaaccacaagctttgtaacaattcggaatccagggatttcatatctcgtcaccgattggaccccttgtccgggtaacctgccagctctgtgtaacgcggaaagcttctattaataatattcattcctatgctctgctctacagtgtacatatggaatagttacggagtacggagtacatatctccgaactcgtcagggcttttccctgcagttcccaacgttgggacgggcttggaagggcttggctatctgccgcgtgggtgtacattatagaaatgaatgaatgcattagacatgtcattctgaattacggagtatatgaggcatatatgttcacatgcatattgtctcctttatacagatcaaggtctccctatatgaagtggtacgcagttcaaaagcgcggaatggataaatcgaggatcaaatgaagccaacatcgacatacatcgaaataagcccgatctaattggaactagtacgccgtatgtattgccatggttgcataggctacgtgaatggcccggctaaatccatagctttccccagatcgcggatcatcgatttttttacataatcgcttcattgcttcaattgcttcaattgttcaattgcttcagaatttcatatatcttgatcatttcttaattagtaaaatcttcaaaaaacattccggctttaatatacatacttcactagtaaaaagatctagcacaaagaacaaacatctacgtcacactgtacgggtgatgttgtcgtcatgtgctcaaaacaggttccccgagcttaactcctccctatagaacctcaaccttcattgagcttcatctacggagtactccgtacaaacattactattagctcacataatccagggcctattcaacatgccctccgagactgaacccctcctccctcgctacgaggatgacacctcccgtcagcgacacctccaccaaaagctacatagctaccaaatagtccgcgccatctccgagggctacatgccaacaactgaacaaaccatcgccaacctccgtacccttttggcttctgatgtgctcaacctgcgcaatcaagatataggcagcgacggtcgccaactagtgcgggacagtcgactgtggatccaggtctttatcgaatttctgcaacagaagaacagccaagaccagctccaggagtttttgtggcgcctggcccgttcgcgtgtcgaggtggatagagacaggctttcgagacaggccgcccacgtgaaggcgcgggcagatactaaagctggtgggtcgcgcatttccgcctctgcaactctccagcttccgggcttggcaaatgcaaattacaaactgatgatcgttcactaatccccgcgcgtagcatatgacagcttccgcactgtcgctggtctgctcctgaccaatgctgattttcgtcttttcgtcgatgacgtcgttaccgttggccgccaaatcttcgctgataccactgagtccctcgctgaatcttccaagctcgttgctgaacaagtcaagccgtccgaggaggaagagcaggcgctacagggccccggtgccgatgaggggcatgcgctatcgaaggccgaggtggaggaggaagttgcacatgtcgcggatgtgaccagcaaagggatcgctcagacgacccatgacgctgtccagagcgctaaggagcacatgtcgggccgagagagggacacattgctattccgactgaagcaggcggttcaaaagcttcgggagagaacggactactctgactcggtggcgacacttgctcaattggtatcacgctatgctaagatctacgcggatgtagcagaggatactgcttcacttgcccaagaagacctggaattcaatgctgacctcaagcgggcggtcgacgaattctggattctcttgcggtccttcggtagcgcagaagagtgggatcggctacaggagaagttccacaatgtcttgcgtcatgcaaacaaagatcccgagtttgatgatctactcggagaggtcggaacttcgttgcaggaaatgctcaccaaccccgagttcttcgactcggcgccgcagaagctcgataaactcaagcaacactctgacaaaataggctcggaaacgggcctgcgaaaagatgtggacgaatttttagcacagaccaagcgcacactgagaaccgtgccggaagacccagccgtctccaagttaatcaacgccacgaagaaggtgtaccacggcgcttggggcgcctataataacaaaaaggccgacctcccagcagaattggtgaacgtcttcctcccagtgctcctccgagcaatccaatatatcccaatcccccgcctagagatctcggctccagaaatggacctcctcctcgagaacctagttcttgaacccggccacacagtaaacttctcctccttcctcccctaccgcatgcatctcctcacgcgcaatgacatcgacgtggtgaaaacccattccaagcgcacagaaacactcatgaaaacagccttcacagtcaccgtccagggcctaaacatcagcgccgaagacttcggctactggttccgcacccacacaggcttcttccacctgaaggacgaaggcatagcaagcttcttcctagaccgccgcggtatcgacatctccctagacattgaagtgggccgcggcaggctggagcagatcttctctttgcgtggagttcgcgtctgtatccacaaactcgactacacggtcaagcgtagcaagtggagattcctcttatggcttaccaagccattgctaaagcacctcgtccggcgtgtgctagagaagaagattgcagaggagattgttgcagcgacatttgcgctgaatcgtgagctagtctttgcccgtgagcggctgcgtgctgcgcgcatcgctaacccgcacgatctggccacgttcgtgcgggctgtcctcgcgcgccttaaacccgctgactcggacgtcgaggctagaattggtcttgagccgctgaataagggtgtctttaggggtgtttatgctcctggaagtattgtcaagacctggaatgaggaggctacaggtgcacaggaggctattgagaatggggatgagacgcatgggcttggtcatacctggcgtaatgatatctttaatgtttccgggcactaattgtgttacttatctgatttaggtgtttgggggagttgctctacttaattacagcgtgtttatgattttatgatgaatccgaactatcaccggatgttaacccgtgctcggtgcttttgttttccgttctaatgctcatctcttgcttccttttgatcacataatactctactaaattaagagtcctaatcgagtctaatattgttgtaggggtagtaaaacatacgggtatcttctacccaggtccttctttgaaaaacactccaatttctctagattgatctcctatttggacgcagtataggtgaccttaggagtaacaccaatgattagggtgagcaaaatataaaaagaccacgagattcggcttttcggctgctccgcaacgaggaaagggattgaaggcttcgaggtagatagcgctacatatttgtcttggccatgtgtaaggacaaattccctttatataactaggaaaaataccagacgttcttaaacagcgatttcgccattcacttacataaagccatcatagatcatacaagctcgggtacctactcatccaatccgaacaataattttagatcctctattatataggaattaactgtgggagacgacaaacaggctgcttgtaggccatattactatccttgctgtcggactcgaagttatccaaaagcaagaaggcatacacatattccagctttgtacatcgatgtatatctatgctgtagataattgagcagcagacaatgtaaccaaataaagctgcaccataaatgaataaaactctcgatgatattcagatgttctctggtcaaaagctagtactcgttcatattgtactcaacatcactcatcgttcattggttgaccacactcacacgtgacacggctaaacattgttcctcttttaggccacctaatgtagatctaagcattggagctgcggagcaaacatctccaatctctaattctttattcgaagaacaccagtgacacgagcgagtgcattctccatgttgattaattaaatattacaacaaatccaccaaacctttagcttgtcgaagcttcacctacctacatacctcggtctacacaaacacaaaagctccacatctctccgagcgcacgagcagctgctcgcgcagctccgctgaaatgcaattattacgactcctggtcacactagctgtagtgctattctcagttgttgtaatcgctgctgaggattactacaaggtgcttggtctcgcgaagtccgcgtcggagagggacatcaagcgcgcatacagaacactaagcaagaaataccaccctgacaagaatccgtgagtggagctactattctcttatctctattttcatgctttcatttctctacgtggctcgcacattacactcgcacaaggcaattgctaaccttcctcgcagcggcgatgacacagcgcgcgaaaaatttgtcgaaatagcagacgcctacgatgtgctttcgaccaccacgctgcgcaaagtgtacgaccaatatggccacgaaggggtggagcagcaccgcaagggcggagcggccggcggcggcggccacgatccattcgatctgttttcgcgattcttcggcgggggtggacactccggtcacgcgcctggacaccgccgcggaccggacatggaagtgcgagcggcgctaccgctgcgggatttctacaatgggcgcgagatcaacttcctcgtggagaagcagcagatttgcgattcgtgtgagggaacgggatccaaggatcgacaggttgtgacttgtgatcggtgcgcagggcgtggtatcgttattcagaaacatatgcttgcgccggggatgttccagcaagtgcagatgcagtgtgacaagtgtcatgggcagggaaagaagattaagaatccttgtcctgtttgtgaggggaatcgggtcgttaggaatcaggttgagactagtgctactattgagccggggatggggaaggggactaggcttgtttttgagaatgaagctgatgagagtccggactggattgctggggatttgattgttgttttggatgagaaagagcccgagcttggagagtcggaggaggagaggacagatgggacgtttttccggcggaaggggaaggatctgttctggaaggagagtctttcgctgcgcgaggcgtggatgggtgactggagtcgcaatcttacgcattttgatgggcacattgttcgtcttggacgtggtcgtggtgaggtcgtgcagccattggctgtcgagactattgccggggagggcatgccgcattactccgagggtcatttacatgatcaccatgaagagaatgatgaagcgggcaatctgtttattgagtatactgttgtcctgccagatcagatggagagtgggatggagaaggacttccatgctctttgggagaagtggcgcaagaagattggagttgatttggcggaggactctgggcgaccggttgtgcctccgccggcggaggataaggatgagctgtgatgattgcgtttccaagccttgttcatttttgattcccttttctttctatggtcattgtatattgattgcatctgttgatttgcgtgcattttacggctatgggctggattagattagacccttggcttgtattaaaatgttggatatgatatacaatagacacggcctgaaccctacaagctaggggtctgctttttttgatttgaaataaaattggagacaatccaattggaccattggtttgaactttgtcgtcatacgtgactcaatttaaagccaaagttcttctgcggacttctcgcttcaatcgatacacgtggggcgacgaggatactgttcatgccgccttaatgccagatggagatcgacgatctggaagatccggccgggacacagttctatacccaatgcacgagactccagattctgattctacctgacactgtttggtcgcgatgcatacccctcgtatgaggggttttatggcgcaggacgtaaacaaagaaaggcgtacagcgcatagatctatggcgatggtctaactggaataggccttgaatgacaggggtatagaacaggggttggaggttgtagcgaatgagcttagtttacctcggactacacaaattccacttccttgaccgtcatttcatgttcgtgttcaatgtgactgatatcaatgtgtcggatgttcgtttgaaggttcggctaggtgctctctccatgtgcaagcatccacttcgcgggtacaggctctgtttgggctttggagagttggctgttcctatttattgcatcagatttgggttatttcataaaattccttagtctaattccgtgggccccattttatgccctatgtgttgttgctttggggacatcttcaggacgagtttcaataaggaccgaaacatacattgtcccttcactaacacaatagacctaggatctctgattcagtatccatatccccttagtactccatggaaacacgccaaacgggtcagggatgggaataaagtgtaatcaatctgtcaaagtttcgcccgtaaagccaaaagttgaaacgattgagaattctccacaagcctcatcccgccctatgcgaagtaaatatccctaaaaatcagctacaacccgagatttcaacctatcggatggccttacaatataggcaaggatagacacagccacctcgtacgaactacctgaggatctacaaaccttaggtagactagattagactacaacacacagttcgtgcaatctgatagggctagtgaatggtttgccagcatcgtatttcaagctgcagtccctgcctctaacttggtgggtctatatgtaccccgtatgacggttgtcgtatgcgtatgcatcatgcactatctttaatttgggaaaacccactatatgcaatgagactaaatgggggaaatatccaatacatactgtccacgttgaggagaaggtgcctagatgcagctataaacagactttggtgagactgatggatggcacgcggattcggaatctaggccggacagacgcggtttgccttcggatagtgtcatagtacgataggaaatgcaaaggggcgcatacggaagcactagtgacaatgccgtcagaaaaggattggtcaatcacgtcgatatatccaaagtttgatggattcaagtgcgttgtagcaactcttttcgtggagcggcgtgtaccgtgcatagtgcatcaaagaaagctacggatattgcttcaaaagctccagttgtggagctcgtgaaccacggaatcatgttcttcgcccacactgccgtgtgttatctcttttcttaactagtaaaacccaaggggctggctgagggggttcaaacagatatatcggctatagcgggttgcggtgtgggattgtggtgatttacgatctaatataatcatttgatttactatgtcatgcttcaatttagtactttgatagatttacaatttaaagggtatagtacagaatagggttgtgctagctccctaaagtgaaagtagattagatccatcaacttatacccatcttgcctttttgtgaacgattaactgtacagctttgaatagacgaagggtctcactataattatgaatgctgtgtatgttataagtacattttaacccggggctgatctcctgcagaaatacagggaaaatatgctgtaagacggcttaatattccacagaagtttctagggcaaacgggcgaatggtaatctcatatctatagagtcctagtatcaggataaccaatcagcagtgcatattttagcgtttcaacgcaagaaaagagccaaatgccgaatttgatagcgatcgacaaacgttagcctacaggctctggtaacggcaatgcgtagacctagcgtctaggatttgatttgatggccttgcatccaacctattggttcggtagtactctaaggttcgtatatatgtaaccatctatatctggaaatatgtatatacgcccattattggtataggaaactgatggtattcatatgacaatggttcacttaagatagcatcacaaataaatcatacttaccaaaatacatctatgtgtaggccaatcatgcctatagatagcatagatttgcggttcactgggaaaagtatatacaaaggtacatataggaatagcaagcatgaaagcccttgattttccaaatataccaacaagcgtgctatccactattttaatgaacacagctaaaataggaaacccgcgaaatcagtaaaaattcgtacccaccggccagactgccaatctcgggtttccaatggtgctttgagctccctcgtatgccttcattggcgtggttccgcatcgaggttgatatatgaagaggaggtatgggttcttgtttgctatcaaaattctctttcgtctcaatcatcagctatcttatattctcactctatctttacttgatctcttaccccatcagtgttcataccttcttgtttatacttcttcctcatacctcactcttcgtctaccttccatctcttctagacccggacttattgctatattaacgatatcttatctgtatcggaagatgcgtcccctctcgctgaagacaggctccagtggcgatggagccatgccttctgatgctctggaacccatcgctatcattggcctagccacccactttccaaagcaagcaacaaccactgagggtctgtgggagcttctcctacaggcccgctcgacgtggtcatcgatacccaaagaacgcttcaactcagatgccttctatcatccagatcccgagcatggtggaacggtaagtcatacccgagctatgacagaccaacatcaacatgaataatcggttaacagatatctgtctagtttcatgtccaaggaggtcactacctctcagaagaccccgcctacttcgatggctccttcttcaatattaccaagaatgagctcctgacattggatccgcagcagcggctggtactcgaaaatgtctaccatgccttggaaaatgctggcattccattgaccagtgctgttggctctaacacatcggtttttgttagtggattcaaccatgactacctaggtatcctcaattcagacccagaaaccactttgaaatacaaacccaccggtgtcaccaatgccattctgtctaaccgtgtcagttggttctttgacttcagaggacccagcatgaccattgatacggcttgttctagtagcttggtggcactgcacctcgctgtacagagcttacgtgccaatgagacaattatggtatgttaccatataccttgtgttgatattgatactatgctgataatatgctgataacgtttaaggctgtcgtcagtggtgtgagcattcttgaaaaccccgcggaaaccatcggcatgagtcaccatggtttgttgggacctcaagggcgatctttcagcttcgactcccgtgccgaaggctatgcgcgaggcgaaggcgtgggcacagttgtagtgaagcctttgagtgtcgctatcagagatggagataccatccgtgcggtcattcgagagacgggagtcaaccaggatggccgcacgccagggattacagttcctagcgcagatgcccaagaaagactaatccgtgaggtctactggagagccggcctggacctcgaacacacaagattcgttgaagcccatggcactggaacaagcaccggtgaccctatcgaagcgggcgctcttgcaagagcattcaaatgtcgccgagagactccgctttacgtcggggcgatcaaatcttccattgggcatctggaaggtggctcaggtgtggcaagcctcatcaaatctattctaatacttgagtctgggattatacctgcaaactttgatatgaagcagacaaattcctctattcctgcaactgagtacgatattgcattccctaccgaggctcttccatggccatctccgggcctgcgaagagtgtcagtcaactcatttggaattggtggcaccaatgctcactgcatccttgatgacgcctaccactatctgaatgaccaccgccttacaggcgcccaccgcaccacatccactgttcctacaacacagaaaatcaacagccggctcttggccctgtgtcgaacaggaacggaatcaaaccatttcgtgacggattcattcgatgacagcgatcactctggacatggtaatacctttatggacacacccacaagcgatggcttttgtgaatcaccaacattcgcatcatccacatacactagcttgatcgaaaaaccaaagctgttcttactctcgacttttgacgaagatggcgtcaagcggaacgcagctgaattagccaagtacttgaaccgaagaatgatgaagtcagtcctccatgactatctccttgatgacctgtccttcaccctgtcgaagaaacgatcccattttccctggaggagcttcgtcatggcatcctcagtcaaagaactcgcatggaacctgtcagaagcgaattttgccaagccaattagaactgccagagttccggaggttgaatttgttttcactggccaaggagctcagtatcaggctatgggccgagagctcatggtctatcctgtatttcaagagtccgtggaggaagcatcggactatatccggcggctcggtagtccgtggtcgctacttggtaatcattttcttgcctcttttgtctaatgtgcttgactaacgtatcacagacgaactcttgactgaaagacagtcaccccgagtcaacttgcctgagatagctcatccgctgtgcacagtcttgcaaattgcgctcgtggatcttctgaccagttggggaatcttcccaaaacgtgtaacgggtcactcatccggcgagatagccgccgcttactgctctggcaagctatcccgcgaaggttcttggaaggttgcatactatcgtggatacgtatcatccaaacagctttccgcaaatggagctatgatggccgtgggcctggatgcatcgcaactgcaaccttatctggactctgtgaggaaggacaacgccggggagctcatcatcgcctgccgcaacagtcccaaaaacaacaccgtttctggagacgaagctatgatcgactgcctcaagagtcttctcgatgctgatgccatctttgctcgaaagttgaacgtcaagaatgcttatcactcggcccacatgcatgcgatcgctcaggattaccttagtctaatgggaatgctttcttttggaaggcggctggcagctccacatcaagtgcatatgttttccaccgtcacaggacaacaagtccaagaggaacacctgcctgcacaatactgggtggacaatatggtttctcctgttcttttcacaagcgggttggttgcaatgacctcaaaccaaatttccagtcatgactcgattgattccacggattctctgcgccttatcgtggaaatagggcctcacacaacccttcagagtgccatcaaagagacattggcctcgaagagccccaagttggaatttaagtacctagccgttctcaaacggacagatcacagcctcaacactctactaactacagtcggcttcctaggttcaagtggatgtgaactagatcttcatgctgtgaaccaaggttcttgcttcaaggcaagaagacggcccagactgttggtggacctgccgccatacagcttcaaacataccgagaagattttatttgagtctcgactgagcaagaatctgcgaactcgaaagttccctcgtcatgacctcttcggtgcacctatcacggattggaatcctacagccccaagatggagacattttgtccgattgaacgaaaacccttggttaagggatcatgtggtaagttcgaagttgtctccaaaatagcctcactcattgacacagcctaggtcactggaaactatgtctatcctggtgtgggttatttgatcatggcaattgaagcatcgaggcagttggtcggcgaggcaaagatcattggtttccaactacgaaaagtcaacatccgaagagccttgattgtacccgataccaaagaaggaattgaggtttccttggcaatggcaactgtcgaagactcgtcatcgtcgcgaacgtggaggcgattccagataacttcctacaatgcatcgagcgaccagtggacagaacattgcactggttacatcaccgtcgaccacgaaacagctttcgatccaattgacaatggccgcgaagcagaagaagaaagccgagcattagaatccgaacttttccgcgcaaatgagacatgcgcaaaatccatggctttcaaatccacatacaacaacctccaaacatccggcctcaattttggtcctttgttccgaaacctcggagacgttcgcgcaagtgcctgtggacttggtaaggttgttggatcagttacagtcccggacattgcacagtctatgccaaagcagtatctacattctcatctcatccaccctgccacaatggacagcatgatccacttgatgatcgcggctgttctcgactttaccggaaagtccaccctggatcagatcagattgccgactttcatacgcaatgtctgggtatcagcagatttgaattcagccccagcccacaaattcacaggacatgcaaccgtgtctatggtgggatctgataaatttgagggccaaattcaaatgctggatgaggaaacaaacacacttcgcatccgcatggacggtattgagctcactccactggagtctggtcttgctgaaagtagtgagcgaaaattgtgcagcgcaattgaattcaagcccgacctccatttcatcgactcaaaatcggcctgtgcactaacttctctcaatgctaccgatgacactgaggctttgtactgggtaaagcgtcttcagcttgcaacgatgctctacgtcatggatgcactggacgagctcaaggatattgatgccatgaaactcgatttgcacatgcgaagattctttgactggatggagcatatgcaaggattgctcgagcgcaatgaaataatacatctgccctacagtgaattccaatgcgcttttcaagacgaggctctcaaggaagccattggcaaggaaatcgaggcccacagcgccgaaggcgccatcacagcccgaatgggccgcaatattgctcaagtcgtgctccaggagactgatcctctgcatctcatgtttggtcaagacgctgtgatggaacaggtgtacaaggaaggccttcacttgtataacctgccgcagcatctacagagccacttgtctctcctccggcaccagcattccgagctgaacattctcgagattggtggtggcaccggcagcttcactgctgaagtcttggccgtcctttctccagaccttgcgaagaacaaaggaagcattgccagttacacattcaccgacatttcatccggcttcttcgagaaagcaaaacagcgtttccaagcatggtccgacatcatgaacttccaatcgctcaatatcgagcgaagccctgtcgatcagggacttcagctagggacatatgacttaatattcgctggcaatgtcatccacgctactgcaaacttgcagaacgcattgcagaacctgcgatctctattgaagccgggtggtcagctcatcatgcaggaagggatccgacaggacttcctgtggtacccacttgttttcggtcagcttccagggtggtggctaggcgatgagccatgtcgccagtggtgtccctacatcccggctgaagaatggaatcctgtgctgctgaaagcgggattctcaggaattgatgtcgagtatcccagttcgaacgatccagatttgacatggcagagtattctggtttcttctgccatcgaaacacccaaggagaagtcatctaatactgcggttatcttgacgttcggtacattgagatccgaacaagtcattaaagacctccaaggtcttctgccggaattgggatacacgaatatccttgttaaggagcctgcagatgtgaaaaattatatcctgcctgatgcacttttcgtgtcattgatggacttggagtctccttacctgttcgatatggacgaagcggaataccacacactcaagaagatgctcagcgagtgccaaaatctactgtgggtgacatgcaatcctctcatacagccacacgcaagtatgagcattggtcttctccgaacagtgcgctgggagcgggatgccgatggctcaaatatcgtcaccctgacagaggcggagcctgacatcacttcgccaaagagccttgctacagctatcggcaagattgtccagcggcaatttgtggacaacccggagaatgatcgccacgccgagtacatgttgcagaatgatctcatacacattggccgtttgaacgagtgggaggcggcagatcagtttcttgctgcacaatcctctcagcaagctcctcctcaacttcaacgcctcggtgattatgatcatcccattgagttgcaggagactgctgttagcaccagcgaataccactgggtcatagataaggaacatgagacaccgcaaaaagacaccgaggtcgagattgagattcgagcaattggtctctcttcgaatgtttatgccgaccgcctcgcgaatgaggttgctggtgttgtgaccaaggttgggcctgaagtcgaaggcccggccccgggtgacagagtcatttacatctcaggcgacaaaaagggtggttgtatccgaacacatggtcgagctgaccaaatgcagctcgtgaagatccccgatgagatttcattcgaagtcgcggccggtttggcttgggcatacgcgacagcaatccaaggactcggggagatagctcatctggcacccgagaacactatcctgatccataccagtgtaacggatatcagtcaagcggccattcaatatgcccagatgatcggagctacaatctacgctactgtagcaaccgtcgaggaacgtgatttgctggtctctaactacggtatatcccaagaccgtatcttttccaggagggatctgagcttcatcaagggtattatgcggtgcacaaacaatactggggttgacgtcgtcttcaacgcactgagcggcgaggcactccgggggtcaacggcatgcctcgctccatttggggcatttgttcatgtgtcgaatctagatctgcgagctgatactacaattgagctagcctctttacctcgcaatgtgagcgtctacaccgtcgacattcctttactggctcaacatcgaccaaaatcggttcgtcttctgctcatcgaggcactgagactgtactccgcaaaaaggatcggtcaactccacacaactgtcatggactttactcggatcaaagagggtattcaaactgcgcatagcggagaagcagcaaaagttgtgattacacctgatccgtccaacatggtccctatggtcccacgacctctccagccttgtcactttgatccacgcgcctcgtacgttcttgccggtggctacggcggcttaggccgaagtttagcacgatgtatggcatctcgtggtgcaaagagcctgattatcctatctcgctcatcagcttcaagctcagagaaaatggaattgattggcgatctcgatagaatgggatgcaaggtccattcactgatctgcgatgtggccgacctctctaacctccaacaattgtccagagcagccttttctaacttaccggctatcaaaggatgcatccaagcatccatggtcctgcgggtaagtccccggtcctcactcctcggtactaaatatacacaaactaacatattcgtaggatggcgccttcgccggactctctttcgatgactggaaagcagccattagacccaaagtccaaggttcctggaacctgcacacagtcctaccggacagcatggacttcttcattatgctctcctcagtcgcaggcatcttcggcaaccgcgggcagtcaaattacgccgcaggcaataccttccaagacgcacttgccgcataccgtgtttcgaaaggcatgcatgcagctagcatcaacctaggcagtgtatcgaacgtgggctgggtagccgagaaccgaaactcgatgcgcacgcacacagccacgttattcgagcttttgcgcgaagaagaggtccacgcaacggttgacttccttatccgcgatcagcaagacggcggaaatgcatcaccgcgctcacagctcatcctcggtctgccgaccgcggagatgtgtcgccagaacggagtgcctttacctacgtacctgaattactcgatgttcacgcacttccgtaacacggcgacagcgaagagcagtgaggtgtctctgcagaagactgtcagcactgctgcgcttttgtcggcggcttctggcttcgagagtgctgtcgttgttgtgtcggatgggattgttgagagacttgcttcgctgcttgccattccttgttccgaactcgatgcacagcgctttagctttggcggcattgactcccttgttgctatggagtttcgcgcgtggatcatcaaggagcttaaggctgaggtttctttgcttgatattatgggagcggagaatattagggctttgagtgaaaagattgccggcaggagtcgtttaattggagggtctggtgcttaattttccgcgtggtttacttatctttctttttttttacgaatcttctggggattatctttcgatactgattagcgttgagctctcgtggtttattgatttcacgtctgatgccccgttacgagatatgatcattctgcatctttctcttaggacattttccaatctctttttggttcatacactttaagactagattcactaacagaatgcctatgagcatttctacacagtttacatcggaaaagatttaaagatttgataaatgcgatacttcaattttgtccacctgagtcactctttgcgaatccatttcgacttattaatagtaggaatatgccatgcttgcattaaagaaaaatagctcatcgaaaccctaaactttccatccgttattcattatattcgtcaacacctaccgtgcagacccggaggggaaataaccccgtaagccctgtccaggaaatgtacaaacagccaacttgggctcagccccggatcgctcatgatgccacgcacgctcacgtaaggccaaataaaccgagcggaacggctggaggtcgccaggtagtcgagcaggcggtttacgaggatcgaagcccagctgctgaagttgcgcctcacaccaatgcagggtgtccgccggtaaatattgctctgtgtcgtagtcggtgtgattctgttgcatggcctgcagcgtcgcgatgtcggctgcgaggccaaagttctctacgcccttgggcgggtggtggtagttcatatagggttttccaggggcgcgctctgggtggtctgcttgtttgcgaatgttgtggatgttccaagtttggacgtatgatttgatatgggagcggagagtgggcatgtagattgcgaagagggcaacctgttcagggattaatgttgatgagaagaggccttcgttgtgaagttcgcggaaatagttctagttgaggtcagtattctgcgaataggtgtaggataaacctgccaaagttgactaacatgatacagtgttactactgatttagcaagctgggcccaccaagattcaatccggtgggtatctgtggcacgtccgggtgcgcagcattgctcacgcaggacatccggctcagtgacgcgacggagtgcaaagtgagcatcggctaaaaggggaacctcagactcgaggtcagatcgaagagtccgtggttggcgatttttagaagcaacagtctcaagatggtttttgaggacacccacggccgtgtgcgcatccacgccaacatgaatccagagaacatatcgagaataagaatcgagctcagcaaaaatgcggaacccgaaattggccagctttgagtacccattcacgtgccaggtcagattaggcccggctagaatctttggcgggggaggacgccggggcacatcactggtgcggcgttcaactgtatccgggcgcagcatgcggtagacactatagagacgatcgcgggcaaatacatgccccttgcttcggaagtggttgtgcaatagttcctttccgtacccctcaatggtccccttgtccatttcctcggtcagggcgtcgaggatctcctgaacctgtgcttgttgttgtgcaggcgagtcgaggcggagacggatgccgagctggtgacgaagtctgcggagtgtgcggtgggagacctcataaccctcatcgtgtagaacggtgacgatctcttggtcggacaagcccacgtcgaagaaaagatttttgatgcgggcatgaagcgcttcattggaggagttgttctccatctttttcttgacgccccatagctgtaggcgtttggtcagagtacgcgacgatatttgaatatcatgctgcctcttcaggtgcttgcaaatgtcgtcacctttcattttcttttcgaacaggccgatgatttcggctttgtacggctcaagatccacccgaggacgacctgacattttacttggcgtatcaactggattctccattttgcgaattcagaccaactaatgttgataagaattagcctggagaagatgttcgtggctggggaaatgcgggcggtgtgctgagacctaccggcagaaatcgaccgccttgatttttttgttatcgcagcggttcttctcgagaaacaacgtcctcgctctgctcagtcattctcgatatatttttcggtttaatcttgtactactgatacgggctttacaatggtccgtgaactcaagcaccatgagaagaagtacgtccgcacctataattaattacccgcgcagaaatctcaatccgatcccatccaacattttgaaagcttcaagataccacaaaagatcaaaagctaacactgaaacccctgcagacttctccggaaggtcgacttccacaactacaagtcagatggcaatcaccgcgaacatgaaattcggcaacgataccttctccaagacccaatggactaccgcaaatacaacgcgctctgcggttctctgcgtcagctcgcacacaagctctcccagctagacccggacgcggacccgctgcgcaagaagctcgaatccgagttgctggagaagctatggcggatgggaatcctgaagcagtcccgcgagcagggcgccggtttgtccaaggttgagcgcgatgttacagtttccgcattgtgccgtcgtagattggctgtcttcatggtgcgctctggcatggttgagactatcaaggctgtaagttgcgtggggatttggtttggggtggattttatgctgacgattgtttcgctaggctactactttcatcgagcagggccatgtccgtgtcggtacggaggtcgtcaatgatcctgctttcttggttacccgcaacatggaggacttcgtcacctgggttgattccagtaagatcaagcgcaacatcttgcgttaccgtgagaagctggatgactttgatcttctatgatctgccccgttaaaaaagcattttgggtttttgttctgatatacccggcgcttgtgcattgtggcctgtttaggtttggcgtattgatgtttcatgaaatgatatctcatgtccaaagttctctggataactcaatatggatatgaatactacctatgttctcgagaaacgtagagacctgcaagcgcttattgtgtcgttcaccgaaggtgctcgccttctattccccgagctaccaggatttgatattgaaggttatatgatggctccacgtcactttcgcatcgttgcccatgctatgcaaatgcgataactaatctttttgctctcttgctatcagttcacatccatctacggagtacgcaggtgggaaaccaccattttgaggtagacttgggcccaatccgagtcttcatcttcttgcccacatcatctctaatcccagattccggaaggaaaataaatgtctgtacttccacgattcaggcgttgttcgacttaacgtatactactttcacaatatttccttcgcttgaggcatttgaggtctattgcgatacacgggacggcgaatctcgagtctggcacgacgttaataatgttgacacagacacagaatatggctattgagtcagatcgtatgttgattggtttacgcggccggatttgagcttgtgtggttttctatgcagaaaagcaactctgaacctcgttttcagaagttacatcaggttggttttctcgcttttaccgcatcgagagcaactctcaattccattatcatcaccatcatctctcactctgttcctcggtcaccgattacctattctcgtggacactctattcatgcataatgaacaaagggcaagtggcagggtgctcaggtgatgatcggtgacgcttaggtagtagcaaagcaggattatctaggtaatgagcagttacctttgaaagtcagggtactcaggtgcacaattttactcggtcgagagacgataagagcagcactagatcaaaaggagcaatgtttccagtactagacattatctgttacataagtaccgtataaggctatgtacagtgttccaataataataggggtatatcagtcttcaaaaaataacatgagcaacgcaaggaatgcaaaagggactggaattcaaaataggccagaggctcccgcgaagaaagaaggttgaacggcgggatgggaaccactggatgcaaatgcagatcatcactcggtgatcatggtatcatagggaaagcagctgaggcagggtatgtttgtgagcagcacctgtgcaaggctctgtgggggtaacaagggagtagtgatggttgaatttaggcattaggaagaggagaagacttcgaacgaagacatgtccaacgtcttcgagctccatcaggtgaatttgaattcaagctggtttttcccaagagctccaagagctgggcctgcggatttccttgagaatccgattccggctcttcatcttcggggatatccatacggaaccgacgcacgctgccttcgcgctcagtcttgccttcctcgaagaacggggtgcgcgagtcgcgggactggaagcagcgaggcgcgacgcggcgccagagaccccggacaccactgctcgcacggtcaatcttttcatattcacgccgccgggtatctggtgaggtccattccattactgtcgccgggacgtggatggacgaggacgatgggctgcggtggtgactgctgggtaaggtgtttgatcgatctcttggtgtgatgaagtggggtgcgctcgtcgaggttggtgaagtggactctatcccgaagcggatgctggaatatgaatgtctgactggagacgacggttccgagctgcctttctctgttgatatgcggctctcgcgttgaggcctgtacgtagctgatgctgtccggtatagagaaagtcttgtctcggtcgagggtctgttcgattcatcttgaaacagacgacatgactcccggtgtaacgctatcagtgactcgcgcttatcctgcatggaactgcgagctgaggtgacaggcacgatggcggcgttgggcacagctcggcgcgaatgcaaggaactgcggcggctgtttggtcgcgatcgcacagtgctgcgggatgccgagcgggagtgactgatcgaagtagatgtcgatgctcgtgattcttgacgaccgagctcgtttcccggtggatcgatccttttcaccttggccatctcagatggggacttgggcgagtcacatcccttgagctctgtgacagtggactcgcacttagaaatagacagagatggctgcagggccaggcatgtgacggaggtcatttcccgtcgggaaacttctgatcatatgcaaatataggcaggtgccctgattgctcagatgtatacatgtatcgaggggaagttcatgtggataagattagggttaatatatatttaaaggagaacacgactgcatctagaacataaaagagaagcaaaatggaactcgacaagcgaacctctttccttttattaatccaacatgcgcacaccgctcctcaactattttagcggagtgggggggcgtctaaagatcgtcgctatgagggcgtctagccagttacttgcagttacaaatgcaggggctttattgcgggagagtatgggggaggggtaggctacggttttttatagtcgcagtgctaacaatatatatagatagtaagtctatataaaggaagacagactattcacaacatggtcgcattgctaatctaggaaccctgtttgcacgattatagtattcggtcaataatcgaggccatattaaatataccaactgcactaactgcactagttaactgcactaactgccctaattaaggagaactactccgtacactaacctatgatagacatcgcatcctgcatgcgtgttgggacaccgccagaccccctagtttcaacaagatctacaaaagacggagaataaatagtatatactttgaagagaatgcaataaaaacttgaaagcgattgtctagaatcatctttgactttgtttaaagagaataaaggaactcggggttctcccgatctgtcaaatcaaggaatctgcagccaaagttagcagaagttggcaaacgttaactaataaatcactcactcttggttctctagtctcacatattctgggtgagcaatgaaaaggatcttcttctggttctcacgacgataccacatccagaccccgaccagcaggaataaacacacgccccaacagacgataatggtcacctcggcggggacatagcggggagcgtccttcgggcggaaggtttgtggacctggaaattgtgttagcgtgtgctcgccacgttttgacccctgtcttctcctgattttcttaccgatgatatttccaacgcaatatccaatcagatacaaagcagccacggtagtcttcttggtatatcccgcgacattggaagaaatcagcgatagcaatgccacgaaaggggtcggactggcttgtgtgaggtaatagccaatcaaacgaccgacattgttagataggggcagagcgacaatgagcagcatccctacgattgcagcgactaacccacccaaactggcgaggatgcgctgcccggtgatctgtccgacatagccgttgattaatagtgcaacgatttccactgcgccgccggggacacccagaatcagactctccttcgcgttatatccgaagcttgtaatctggactggtcagcatgcttggaatcttcaggtctttataagctattatcaacataccaactgactgaagaaattggaaatacccccatttggaatatcggcaatcaaggcataaaagaagaaagcccaggtcatcggatccaaaagcgcctccttgacctgatatagcttgaagtgcttattaccaatgccttgttggttgacccgcacgcgggcaacagccaagatgcgatcttcttcatttaaccagcgtgcattgagttggttatctggcacaatccagaggaataccagtcccaggcagatggtgaggagaccagtgacgaggaaaataatcttccatggctcgatggccgacccgtgtttctcggcaccgacggcgatgccgtaggcgattactccgccgagaatttggccgacgccgttgaagctgaaccagatgttgacgcggctgccttgttctttttttgtgtaccactgtttgggactgtgttagctcgactcattgtgtctaggttatagcctgtaggaacagagatggattttgtacctgggaggttaaaagtgcaaagcccggcgtcacagctgcttcaaatacaccgagcataaagcgaatggcgatagcaccggagtaattgttgacagcggcaaaacagctgagaatcattccccagatcaagatgcaggctgccgagtatttccctagtggaaggcgctggaggaggcggttggtcgggtattcccaggcgagataacctacgcaggagagctattaggtttgaagctcccagggaagagtcaattcgagagcatagatagaacataccaaagtagaacaaactcccgagccactgatactggtctccctcgagattcaaatccttcttaagacccataacgctggcataggagagagtggtttctacacatcagatcacagattaacacttcggattgaataaacagccaacagaacaaagcataaaaccaagactgctctttgctgtaggaaacaaaatcgaggaaagatatgcacatactatccagataattcatgccatagataaagcacatgatgggcatcatatgccaatcgatgatttttaacaagcggcgattcgtagcttcatccagctcgatagtttcaccgtgaagattgccaagggctttcatagcctcatcggcgtcgtgtgcatgcttctctatcgtggggtcgacatgttttatgttgcccatgtccatgccggtgtccacgctagaggaaattccgatagctttttcctctgaggccatggtgtcggttctatggggtaggtcgtaaagggacggggcagtagagtaattcagatcaagtaggtcagacagacaaatcttaggcccttcgtgagttgactgtagtacaactataagcaataccaaggcaatgtataaaaagatcaaggaacaccaccgggcgggcacagctaaataacatataacagaataacggtcaaaactccgcaggtccgatagctatacaggacgatcttagtacgtaacattaaataggttaatataccctgtactccgtgcgctgtacctctgagcaaagccgggtagctctgcccaggccgttatctcaagagtctcctcgaacgattcatcctatcacacaacgcagcacatgaggcacggcaaataacttgtgggcctctccacgataagaagccgatttatctggggttggcggtttgatgatgtgtctcattggatggccaagagaggggagggggatgatcggcacggaactgccatggtctgttggctgcggcgttatggttatttatcaatgcaacatagggaaggcaatgcggattattgcggagcgaagtagacgttacttacttggtgtgtatatgcggggatgcacacacatgtagtaagaatacgtcaagagaaaggtcgctagttacaatgtacaatgtatagattcctagttccgagtgaattccgatgaagtttaagcaaaagtacgtgttcttatctattgttccaagtggatttggaaaacgtctccttatcaaagttactccagaattcggatattcagagacttgcttttgatcttcatcgcagacggtgtgaaacatgctgatgagcactcgcatgtcttagacttaaccttgcccttgcatcctctgggcgtgcaggaaagcccttccgtagccggagaggctccagggctcgtgagcaatgatgtaagaaagcatcaagttgcaaaaaggttatatagcacgtcatcaaatatagaattttcattatgtatgtacatacagtggaacgtggactgcacactctattgcgcacccacacgggccagatacgcctcccagccctgctgctggtactgtttaacagcttcaacagggtccgcagcggcatagataccacgaccagagataatgaagtcggcaccgcggccaatagccgattgcggtgtctggtactgctggccaagcttatcgcctttagacgagaggttgacgccagtggtgaagacgacaaagtcctcgtcctgcgcgggcgcctccgtagactcgacctcgcccagcgaccgggtcgagacaaagccgagcacaaagctggggtacttgcgcgcgatatcgacagaggcggaggtgtaggcgcctgttgcgagggatcccttcgaggtcatctcggcgaggatgaggaggccgcgctcagagccgtaggggaaatcagtagcctgggcagtttgcgcgagggcatcgactatgccctcgccgggtaggatggagcagttgattatgtgggcccattcggagatacggagggtgccgttgtggtactgtttctggacagtgttgccgatgtcgatgaatttgcggtcttcgaagatgaggaagttgtgtttttgggctagggcattcaggccatcgattgttgcttggctgaagtcggagaggatgtcaatgtgtgtttttatgacggcgatgtagggaccaagacctgtgaatgggttagtaggctgtttcgtcggaggggtggtggctgggtttacttacggtcggcgaggtccaggagctcctttgttgtggtcacatcagcggagacggtaacattgctcttcttttcttccgcgacttggaaaagcttgcgtgcgaggggattggggtgcgattgggcgcggacgctataggtcaattgcgacttggacgacatggcggggttggcggggtgggttgatatgtatttgtatgtgattttgaggttcaaacgataagtgaatcaaattgaaactggctgataaatgcctttagaatacaattctcttttttgaggtccgaaagcagaataatagaagcgaagttcaagtcgaagaccttcggggaactttttctgccacggtggacccacgggccaaaccttcccggaggctggaactgtggcgcataatacgcatttgacatagaaatacatagcacatcttcgcttcaagcgcttagaaagaaagcaatggccatccaacaccgtagacactcaatccgaagagggcaccctgcacaagccagaagaacccgcccatcatacggcccttaccctgcggtttgcccgagtacacatagccgtagaggaacagagcccggaagaaaacccacagagcgcccagaccagcagcccactcaggatatttcagaccagagaccaggatgaagagcattgtctgcgaagaattctcgaggaagttggtgtgggcgcgttgagcgcagttgaacttctcagctttggcctataactagttaagtaggtgccataagaagtgtataggttcctattggatacgggcttgcggaggctgggtatagatgggaatgagacgcacgttttccttgcatagctccatggaggcatagctgtgggggtagggcaccttggcctccttgcgcaggctgccagtaatattgccgtgaacgaagcccaacagagggatggcgccgagtgcgacagcaatcacggcgctgagtatcattagcttctgttcaacgaagcatgaaagttaagctagaagaacctacccgtagttgccaggaacaatgaatgcgaccatgatgagaagagaatttggggaaatgatgcgatatggtggctctccgttatgattgtgtttgattgattacatgtatggagctcctttatacttaattggaggctcgggggtaacaagctccgagctcccgtcggtggaatcaatttgtccgttccgcccagtcatctactccgtaactatggatgaatgatggatacgagtgagatctcgccggcctacggccgtcgagatagccgttgcaaagcaaagcgactgattccaacttctagtgctgcgcaaggctcccctcttactgacttattggcttcacagcgactgcttttgtcataattctaggagaaaacttggccacgtgacacgtacgtacgtacgtacgaccttctgatttataattgcttcgcttcgctccgcaatcattgatgggtaatcattgatgacctccctattggttgatcatgcaattcatagcaatgagagggcaaataaccaatctcatgttcttgtgcaagggaagcttgtctagctttcacaaataaatgttcaaagactgctataagttccgactcccagtatatatcaggagtaatacgatacacaaaatgtccgctaaatgctggatgtcaaagttcatgttcccacgttcgataccatcctacttacactcccgtacttggcttgccaagcgaagaagtataggagcgctcccagcggttgtccgactagacaaaagctgacccaaaagatgcagttcccaatgaccctgccttcaggcccgcgcatattttccaatggtgcggtgaggctaatcaacggcagctggaacatcatcccaaagaacgcgacacctggacttgattagcccctaagctgtggctagagagtgaaagacataacataccgatgaaattgtgtgtcggaatgcccacgagcatttcgtgaagaatcgcggagatagtgaaaaccattccactcgcagctagaggactccatccgcgacccaccagtggcgagtagacatgtctcttcatgaacaggtagacaggccggttccaagatcgccaatacatacccagactagagctgttccaccaatcagtgtagaattcgcggtcaccaaaccgcatgacctcggccaaagcgttcaaaagcgattggaacaatgcaaagaagccagcaagccaaattatcagcgagatagtggatagtttcatgacccgctccaagatagaggcaatatccattactgcgatcttgtcaattgagttgagcaacaccggtgtggcatactgcgcagacagaagccaaatgaacactgccaggcccacgaactccgcaaggcgctttgcaacaaatgaccaccggatggatgctgtgcgcggataaacaggctgatacaccagcgtcggcgccagccaaaagtacgccaggttattgatggtaatattcctagggtaagggcacgaggagtagatttcgggcaagcccgggtctgcggagggattgagtagagcgaggcgaaggtctcggtttgtgaaggcataagagcagttcttcaaccacacgatgatcgcgtgcagctcgcatattgtcccaatgcctgggtggtggatgtaaaaatacaccacaaagctagtcactgtgaggcacagggtggcattgagcgtgtgcaggaaagcagtgtacggccaggtcgactggaagaccttctgatcgtgctctttctctttctctgtctttttctgacggcccactgttcgcttagccgcagtagcggctgagagctcgatgatgtatgccacaagcaaatgacacggaaccgaggcaaacaatatagaccccagaacaacgtcttgcctgcggtagtcgtggcatttaatacaaattagcacgccatactgaatacttattagctggcaattcgacacagtgagcatttggattacccactttcatgaagttctcaataaccaatcgcaggttcattgccactgtcgaaacattagccgtttccatatacaattccctagcgatccttaccgagtaccaacaccataagatttcgaaaacctaggaagttgggaagcacgtcggcctcccgactgaggctggaatgacgagcttctgagtggtatgcagctacatggcgatatttacttcgtttccttgtagttgatgttgatggcggagagacctcggtttcattctgaatagccccgttcgtcgaattgagctgcgattcctcgcgagcgcttttaactgacccagtgcgagtagccattttaacagctctgcgatctcggtactgtgagagattgaagggtcttcaagtcgagctccgattaaaccggagcaccgacggagagcaatgcggagattacaacaacaaccaggccgcacaattacggcaaataggaaaagaagaaaaggagaagaaggagaagacaaaagacagaaattagaaataagatgatttaatactgggcatggcgggggacgagacatcatagcgcaagcttgcagataaaacttgcaggggccaatcagcgtcacatgcgctcaagggacggatcctgcactccgaagagcttcgactctctccgcatctattgctctttttagccctgaaccggtccgattcagtattcgatcagtattttaaactccaattgcctgcgatcctcatgtttgcgaatcgacagccttgatcccgtacaacttttcgaccggtcgcgatggcctactacgaggacaatggaggtgacggcccagggcggtttggcaagaatttcgacggtccagtcggacctcgtagaccacgtatgtttgcttgctttaaggttactttgactgagcttctgcttgttcatatcccgactgacaaccgttactcttaccctcaggtctcgtcacggattatggctcttcgatggtacaatggatgcgaacacggcaaccgagatacaaaggaggacatcgattggagacggaacgaccgagtcccagcttcgcggtcgatgtatgtgttgcttgatctgttctggtctggcgagcaaagaaactgacatgcgacaggttcttcccccgatggcgcggccctattctgctgtcgatacaatccccgtccgacaccttcaccagtcaatcggaaaatcaaagaagcccattgtcgtggtgcgatggactccagagggaaggcggctgttgaccggcggtcatacgggagagtttatgctttggaatggaacggcgttcaatttcgagaccgttatggatgtgcgtatctacagcttttgcggattgcgccctcactaatctgagatgttgtctccggtgcaggcacactacgatcaaatacaagctggtgtcacgtccttggcatgggcccatagtcaggactggctagtctctgggggacaaagaggtgatatcaaatactggcgacctaacttcaacaacgtggagactatcgatgacgcgcaccacgatgcagtccgcgatctggcctgggcacccagtgataccaaattcctttcagcgtcagatgatacaaccctcaaaatctttgactttgcaacccgaacggccgacgcgacactgaccggacacaactgggatgtcaagtcttgcgactggcacccgaccaagggtctaattgtttctggatcgaaggaccaccaggtcaagttctgggatccgcgcactggccgctgcttaacgacactccacagccacaagaacaccgtcacatcgacgcgattctcgcgtgtgaacagtaacctccttgctacttcgtcgcgagaccagactgcgagggtattcgatttgaggatgatgcgtgatatttgcattctgcgaggccatgacaagccagtttcttctctcacatggcatccgattcacagtaaccttatctcgactggtgccgaggatggttctctctatcattatctacttgatgagccacacctgccggctggccagattcccaccgtggcgccgtacgacagcccggacccggcgaatactccgccgcaagtgatctatccggcacatcgggtacagtatgcgcatggtgctacaatttggtcgctagattggcatccactgggtcatatattggcttctgggtctaaggataatttcactcgattctggtcgcggactcggcctggcgagactagctatatgaaagaccgattccacatcggcgaagaggccgcagaagcccagggaacatggaatcgcgggtttggccggaaacaaatgcgcgaggacgaggagcaagaaatgcaggatgaagccgacgggctcgtcgatcaacgaccaggtggccctgctctgccgggtattcaaagtgcgccgtcggccgtccctcagcccgatcttccagggttgctacctggtattggcagtgctcagcctcggcagccaggaacggatggcggcgctatgggtgggatggatccgggccgtttggctgcactcatgtccactcaccctccatcgcagtcgagtacccccacacctggaatgcatgggttccccatgccgcagggtataatcggaacacagccgatgaatatggatctagcacaattacaaaagcaactccagggtttccctatgccacagaatctcaaccttcaagctttggcaaacaaccctggcttccctggtggatttggtggcctgcctggtttgcaaggcggtggtatgcccgatggaaatcggagacagtgatgaaaatggacatctgatttgaaatgcacgttgaatcggcttggcattggcgcaaaggacatagcatggctactttgatgcggggtgacggcgttatttaagatatcaaacaccatttgtatcataggaaattttcgggcatttcgaagcctcctggatccttgttgatgagactgtttgcgtaggtctaggttggctgggcataaacctgtagctgccgtccacgtaggtagacacggtagacaattgttatatccggcacatccggcacagtagtatggtcgagtagtagcagccggtataccattcaaaggccaccttgcatagggaagctggtgacaataagaaccatcacattgacaccgccccatatcatcggtagccaagttgacatcctgaaattgcctgcctcatacaccgcgccgaggctatccaccgtagaagcgttagctacctaatcattcgggaggccaagtgtcaagcaaccaacttacacaactccaattatactcccggctagaagcgactcaagcgctgcaataaagatgtacaccaacggcacaatccatatcacattccagttacggaaatgggtcagtactgcgcacccagcaacagtgagatgtgtcgctccgtagaatatcagcgtccagaaaagtgtgaagcgccagatgtccttcgtgtagtataggtagtatgcttgatgatgatgcgccggcaggggatcgtacaatgacggaaaggaaggcacttcgtagttaatcgggacgcgattgttggccatggagaaatagctgcgccgtttcagcaatcaatcatcaaagcatgacacgtgagcaggggacagtcactttgaccatatgtgttgctagcgtatcaacaaaaaccgcatgtctaagagactctcggagatgacgatgcttgtttgcactgtttagctccatatcattggtcagcctttcgtggtggatgccccccgtatttagctctggacccggacctcggcttcatctcacccattgagagatgtagagactcttgtctgggagcatccctatcacctccagtgttgaaatggccacggaaagatcattagctacgctgctacggtcgctgcaggcgacttccagcttccaagatgccgcttcgtaagagccaaataccccaatgaggtcaatattagactaacaacaggccaattctcagtctgcttcccacggctaccagtttcctttcaatgttagggaatcctctaaacctgacactcctttcctcacaactcctcactgcaccttcgctctggagccaccccgtcgacctccaatcatgtcgcaagatccttagcgtcttcaataccgccgccatcgccgtcttgcagaatgatactactgacgaaccccggattccgtacgggcggaatagaaagatagagtacgaggcgtgggttaaggcggtcgctgagggcgccgatgataagtccccgcggtggaggcatacgctgctgctgggcggaatcttgatgggattcgagggacaaaaccgacggggcttaccacgacatattcgggtgaaactcgagatggcgcttgtgagagcggcgcaattagcgctggaggagcttggttctgagactgggattgatggacagtgcctcactatggtcttgaactacacttttgagctgctgtcagattccgagagaagcacgctggattatgatcgtttgctcccggcgatgattcagtcatcatacttgtcttcggagggcctcgacggtggctattttctgggatctattgatcaggatgttgttgaggcctccgggaagcagtttcgctggtcggccaactctcccacatttgctattatctcggcagtagctgctcgcccgcttgtgtccactctggggcctttgtctcgtcttatcgcgcattctgttgataatgtccgggatccgcgaattgttgcgcagactgttgattacctagcgggttttgttcggacactcatggttcaatggcggcagaataaattgtctgagattgatgttgcggaagaagcagagttcctagactctgaatcccgggacattacgcttcctgccctctggaagctgttgcgaaattgcttatattcggtggttatcacacttcgggctgtactggggagaactatcaatgatccagctcttgccgccaacagtagtgagttacagacgagtcgtgtcattttttttttttactaactatgctcctgtcaggcgccccgtacctatcgatgcaatgtctccacatacttcgcaacatgtatttcatctcttctcggattggccagaatgcctcatcgcagcagacgttcgttatgttggcagccatagatatcctctcccaatatcccactcttgccgagaacttcctgagaagcattaagccaagcgatataggacaaattcctgctcacccaattgaacgatgtctggatcttttcttcttgaatgtggcagagcatttccctcttgtcctatccccagggacgaacgaggaactgttactatccgccgcttttccatatctcgcagccggtgctaacagtcttctgttggagattttcgaagctgctcacagcctagtgcttgttgtcttcgctattccccacaactcgggattagctgccaaacacttgcctttttatatagaaaaccttttcgctgtgagtttcatcctggctattatacgaaagtagttgctaatcgtccacaggttttccctactaacctttctgcgcgccaattccgccttgcgttcaagactgtcatccaaattacagcacctccttctcctctggcgaatagccaacccgctctcccttcaatcttgctggaagttgttcacgatcgtgctttgaacgcttcctctacaccgatccctgcgcagggcccaaatccagacatgagcctgagtccggccgtctctgagcaggctgttctgacccttgctctcatcgattctcttccattcctcctagtcgatgatctgaaagaatggttgcctttagcagcacaattgatcaacacaattaccgaccgcgatatgcgacatgcttgtatcgatcgtttctgggaggctatagccggcggcgagatggatgttgatcgatcttactgctgtattacatggtggagcactgaaggtgggcgcgagcttgtccttttcggcgccgagaccgccccgggggagtctgatgatactggaccttacatgagtggcgcggttggaggtgtcgcgcctgaaagtaagctataatgatgtcactttagatagcttgcaatattgaagctacggctccaacgggtgcggtaacaccttataccatacaccatacttctaatcgatcaagtctagttctgaacattttcatatatactaatattagtgtgttcttggtatttattcgactcatcatctttgaaaatgtaacgttcagcaactaaattcccgggatcccaaccggggtagcctttctgtactgaacatactcgtcgccaaagaaggagatcaagtaagcttcttctcctgcaatcacgtaaatcagttagcaagaggtccaatgcgcaaaaaccgacagacaacttacgcttgatccggctcgagaagaactgccacaacacgagggcatatccaacaaaacaaaccatattccctagtatcaactgtgttcccagaccccaccagaagaatccaaagtagctcggatgccgcagataccgataaagcccagtattaaccaaaacatgaccctcctggtgctgactctgcacatgatgattgaagttactagcagcctgcgccatagcaatagtccgaacaatctgtccgatcaatagaagcgcaaagcctgcgacaagcagaagcgagaccgagcttccgaaaaacggttccgtcacagtgaccatccgcccagcagcagtctgcccgggccagaaaacatgcgacacgatgcactccacgatggcagatccgtgcgcaacattatacgcccatccgttagatgacagcaggaacgcggagatagtcgcataccgcgtgttgtattgcgccgtcacgtagaactccaggaagtggaacaggctcagtgaggcgacgaagaacggcacgcgccacagtgaacttggatacacggtacttaggaacaatgccatgcttgctgatagcccgaggctggtgccgaggagcattgcgcgcagcgaaattcccgccagagacatcttgccgtccgggtagattgaggtatcggcatcgggcgtgtcggttgaggcatcggaggaagaagggaaggatatattgctgttggtgcggtcgtggactggaggtccgggtggtgagatgtgtttcgaagtgtgggtgaagttcagggctttgtttggctctgcgccggagcttgttgcgagcattgtcaaagaaatagagaattgcttgggaagaaaggggctgcttcttgatgtgtttatttggttcgaaaatcgggcatttcgagggaattagtggaatttaaatagtgtgtgttggtgaggggggagtttcattgtctgagaacaatctcaagaagattgtattgtttcgcatcggcacccgcggactttttcccccgacatgacggtggacatttcaccccgggcccacatggcctcggctttagagctctaatacctcaatgtagcttgaattacaagctagtgcctagcttcgctctttctcctctcttcgagatagctatgaccatcacaaccatgtcagagcctgccgagaaagagaagatgcttcgcggcgagctctttcgcgccttcacaccggacttaatcgctgcccgtgcgcgctgcaagtgggcctgtaatcggttcaataagtcggacgaggtgcctcgtcggcgtcttgttgaaatgtggagagagtgggtgatgcggtcaagctgaggcttaggtctacttcatcctagaagtatactatttatactaaaccattatatagtatcgccgacgaccagacccctctgccaccaaagctagatgaccccgcagctgatgaagctctcttcgcgcaggacccctggatcgaatctccggtccatgtggactacgggtttaatgtcaagcttggagcgggcgtcttcgtcaactttaactgcgtctttattgacacatgtcccatcacggttggggctcgcactttgtttggccccaatgtgagcttgttctcggggactcatccgcttgaccctgccctgcgcaatggcactgaaggccctgagactggcaagccgattgttatcggagaggactgctggctcggcgggaatgtgactgtacttcctggcatcactattggcagaggtgtgacaattggagctggcagtgttgttaccaaggtatgttgaatgcaccttctgatagcctgattgtataatcatgctgactttagcaccaggatattcccgcttttcatgtggctgctggtaacccagctaggatcattcgtcggattgaaacgacaatgaaagagtgattgaccctgtgttattcattgactggtagatagtatagagatatatatgactttctggctacttgcatctatcgaatatcaaagggatcaaactgcgtctagattacatggacgtcatgcacgcctagttcagacagcgatatagataatgataattaactagaatgactctccaaaacctttgacaaattgggtaggattcattataccacgatagacgccaagagtccagactcgatgcataaggccgcataaggggctgtgcatctttggtgctttatatcggtttttatatagctggaataagagtgtagataggcagtcacatttgctacaaactgcacagtaatcgaattatttccctcttctttctatgcaaactgcaataagcaatgtaccatgcaaatacgcgataatcaatctccaggagcttggttgtgtctttgttaagagagaccatcttgtgaacgctctccacagaacaacgtcactggtcctggcgcgtcccccagaaaagctgtcgaccgctttatcttttctaaagacctttacttttctcccactcaatccttttcttaaactcacaaccttctttttcttcaaccttcattctcgcatcaccttcatttcacgcgttgtttcaactaccctgggaccactacgtgcggaaaatgacatggctgtacccccgccagatagctcttacaccccacctcacactcccttgatcgaagaatctccattcatcagtgactctatggacgatcttgatcctcaggcgacccggaaacgtccgcgtctcgacagtggaagtcgcgtcagtccgaccttgtcgttggatggaacctcgcgtactgcctccgtcgcacctgcctccgacatggatgaggcctcggattctggaaatccggttaacaaagtcaccattaacacaaaatctcctctatctcccatggctccagacctccctccttccgacgctgggctctccggcagcgacctagagcttctaccagataccgatacagctcccaatcccaatcccatttcactttcctcctcgccctcctcatcccgaagtcctcaaatcgaagtcgctgaaccggaagatatcaatcaagacccgaatacctcaaactggaagtcactgggccaagtggtgcgggatcaggatgagcccgaagtgatagaaatccaagacgtggctcctctttccgactcgttccctaaagtacacactgagatgacaccccgagagaatttcaaggcgcttggtgatatgcttgaatttggtaataagagactccaatcaacgagacctgggcaaaatactaatacagccaataggacacccacgcgaaggcacggcgcttgttacaataaaacaatggcttcacacttgtgtgcacgatcttgatcgcctcacaatcgaggaattcgcggccgatctagatttctgggaatacttgccctccgtcctggaccgtcttttgcgcagacaacaagactttcaattagatggaattgaagatatctcgagcttcttcgagcaatatcttctcgattatgctcgcattgtccttcatcttgttcgcttggacaccacacttctccgggctgttgacgaagatgacggtgacatcgaaatgcctccaagcacctgtcgacgatatcttcatagcttcccttggatattccatagcgaccaaattccctttttccgggtcctggaaaatcagtttagcaccgaaacgcgcaatctccctgctcgactaaaagctcaggtctcagctcctccgtttgatgcacccggcgcactcattcaatacgctttgcacctgcttgcattacttccgaattgcccgcaaatcgttaccatgctgtcaggccctttggtcaacatgctagcgttgtttgaatgcgacacggagaggaaccaaaatggtgattctgattctcccgttgacctgcctatcgattcaaccagcctccagcctttttacgaaacggttcgagaaattgacaaagtatacaacacatttgtcgcaaagaagtcgcaactggccaccagtgaactgagcgatagtctcctgaccccaatcttccgcagctaccgtttcctttgctttggttactcggaatttttgctccaacttgcccaggaattgtccattcaactacctgaggaggcagatgcagagcaagctgctttgtgtgtcatttggacgtggaaattcgataccttaaagaagcaaatcatggaaggtcgaatggagcttcgtgtccacggcgtggaaatgatgcaatcggatctggtcagcatctggggtcaaaatatatcccagaaccgcgatggcatcgagtcgccattcctgaaatatttggttgaatatcttcgggagaacaagatcctcgattacctcgtggggattgactcacacccacagctgatcagccgcagcagtaacatattcggattcctgattgtgacggcgaaatacaccgaccatgacacggatgttatctggaaaaccgtcaccgagagtcaagatgatcgtactgtttgtgaggtcatgtccatgctcgcacggacctttgccatgcatccgtcgaggtctaaagcgttgctctatgtgtgctcaaaattgcttgagtttcccttagaccgcttcgacagccgcataatcgatttctgtgagcagctggtgcctcgtatgcgcgaacggcactcggatcgcgatcgggactatcgtaacatgtccggcgaggagcatatcgattctattccactaaagctctgtatccgcctaatccgtgagagctctggagcgaaggacctgcctctggaacaaaaggaacttatgcagggatttggaagcgagcagctgggacagttcatcaaggctggactcaacgaaaccgacatggcagagacatatgagcgctgtattcaagacattgcggagatgaatgaatgcactgcgggcagtatccaagttttgaatgcactagtaccgcgtgatgacgcacgagagctttggaaacttgcgaccgatttcgacttgacgcgcttagtgataatcgaacttcaccatctcgttaccaaagactacgcgaagctcaaggatccgtcttcaaagcatggattttcttcgcgggtggaaatcctgcggcgtcttattgatctggccccagaaacaatcacacctgatctcgggaacacactctggaaggatattttcatgtccgagaacctggctgctgaggaacgtcaaacgatttggaaaatgatggttgatcttaccaaccgtaccaccaaagagaacccgtttcttgaactatgcattcatgagtatctaccagatgtgcttcctaaggattactcgcgcgaggtattatggttcgctcaacagtcggttcactacgagattcgaatcaagtcacctcccattgttggggaaaatgaagtcatatctattcctggaatggatcgaatctggaacttcatactgacggcacctccgcaatcgatcgaagccgaggcgattaaattcgccatcgatagctatctggaccacggtattgttcgcagatccccccggtcggctatcgacgctactcatattgcactcgtcaatcgctgcgtggaccaactgaagtctgcagctgtcgcgttgaaaccttcttgcaacggaacaaccaatgtcgaagtttctatggatatcgacagttccaatcaagacgtcggaacggacgaacttatgttcagccggtctctacattttcttcgccaattactgcatggattgcgaactcgcccacagtacagctccccgcgtggctctccgcccaccctcccggaacgtcctctgaaaggcgagcccatcgaatttcgatatcaatgtttcaatggcgcttccatgtccaagatatgttcaaagcgcattggtggtctctctacggctgccgagcttgtagaaatgcttgtgcagctgagccgattctcgaagttcacagctatccttggcggacagaaggtcgagttgctacaagatccagaggcacttgtgaaaaacctgaagctatcttcaggtttactgattcttcggaaggcccctgatgcccatgaaatcacgtgggccgggagaccgcagtctctgacagcagtggacaacgaagtgctgaagcacttcgacgagctgtatgatatgcttgacctcaaggatgatttggctcgacaggtataatcccgttggctctcttattctagcgggatgttgatactgacactttgcagattattgacttcttggtggtcttcccacctcaagtgcgggccctcgaacttgttcgatccaacagcaataccgagaaagacatgttcccgttgcaaagacctttcaaggctttgtactccttgaatacactatcgatgtgtctccacgaagaggctgcagaggtgagttaaccgtttctgggttgaatgatattcttgctaagatcgtcatagatgtctccagaccaagcttttgtgtctcatagcaatcgggttttagttgctttcctgacgtcagacgaactgttcagctcgctctccggtaactcggtaactactgtgcttgctactagagccattgaatgtcttctactggctatatccggtatgtcgaatattaattattgttcagtcaatgggccgcggccaactaattgtgacctagtgtatcgcccgactgacgatgagtccgttcttattgccgatccaatgtctttggtccgacgcgttcttgacttgcttgaaattggccgcagtggtcccaatgatccaccggcttgtacatgcgcccaaagcttgatttgcaattcctttgcggtcttagtcgagggttcattgcgcgaccttaatgtctggaacgctgtcaaacagcatgcccagtttgatcgcttaatcctatctctactcctggaagaaaatcgaaagccaattcggactgatatcctggaacgcttgaagataatctgcgggcccctgaaaccgttcaagctgtctacgaaaaaacccgagatggaaacccctactatggaaaaccccaaccggattgacatgcttgccactctgtggtcttcatttttgcaagtgatcccgaggaccgttgagcatgttccccagtctgaagagttcttccacgctgctctatggatgttccgcacagtcgctcagaaatcgcctcgggacttgatcttcaacgagtatcttcaacaatggagtgcagttatgctcactcaccaaacagaagaggtattttcatccccgaagaccaacaaatactgtttactaatggtttttagtttgttgggcgtgagccagcagacaatttgatcatagggttctctgctttgttagaatggtgtctggaattgggcaacgccgcgggcatcactttaaacactttgtatgtcttccttccccgtccgatcaagtatgcagacatgcctaactgggttttaggaacatcgccgaagaaatattcaacaagtacctattcccggatttctctccagaaacggtggaacatgcagtcccacagattccagtcatgcacagctacactcgctcgagcctttacaatgtcgtgagcctgttgtgcaagcagaacgatcggacttattgtgaagttttggacctcctcaatacaaatgttccacgaggttagcatcacggaattttgcccactgcgttttattttcacactgaactaaccgcaaatctagactccccttatctggaatatgcatataatagatcgttgatgcttcggtccccggaaggctatgcgggcctcaaaaatctttcgaacacatgttacctcaactctctcatgacgcagcttttcatgaatatcgagttccgagactttatcctgaatctccccatagccgatcgaatctcccaaaagctactctatgaaacccagcgactgtttacatggatgcaggagacttggagcaagagcattgagccctcagactttgtgaaaagtattctcacatacgacaacgaggagattgatgtgaccgtccagatggacgtcgatgagttttacaaccttctctttgaccgctgggaagctcaggttctcgatgccgacaagaagaagaagttccggtctttctatggagggcagcttgttcagcaaatcaagtcaatggaatgcgatcatatctcggagagacttgagccattctccgcaattcaatgcgagatcaaggggaaggcgaccctcgaagacagtttgcgggcctacgtggcaggcgaggtgatgcagggaggtaagttaatactgcgcccctaagggagctcgaagtctaatgagccttcagataacaagtactcttgtacctcatgtggccggcatgtagatgccgtgaagcggtgagtgataatgatatagtgacacaaaccgactttctgactcttatttagtgcttgtctgaaagatgttcctgataatttgatcttccacctgaagcggtttgacttcgacatggtacatatgctgagaagcaagattaatgacgagttccaatttcctcaccacatcgacatgactccctacaccgtcgagcatctctctgacccggagcagaccattgcgccggacatctttgaattggtcggggttcttgtccacactggtacagctgaatcgggtcattactactcgtatacccttgaacgcccctcgtctggcggcgaagccaattgggtcgagtttaacgactccgatgtcggcaaatttgaccctagcacaatcgcaggtcaatgctttggtggtccgaatgagacgacgcagtacatgaatggagcctctaagagcaaagtctggaatgcatatatgctgttctaccaacgcgtgtccacaattgagaagtccaaagaaatcttcaagccaacgaagcccgacctccccatacacctccccgtatcaatttcgacccagaactacattgcaatggacaacgaaatgctcattcggatttactgccttctggacccacaatacgcatacttcgtgggcagattgcttcagcggtggcccgacatggcaacggaggataccgacaagactaaggcagagtcattggccatcaatgtcggaatggacactattgagcaattggtgacacgtaccaaatatttccaaggacaccaggaggtttacagcgaactcgtcgacatgatcaacaaaagccccaatgcggcccaatcggctcttgagtgggttattaatcggccaacttctatgtacaatcttatgatcaagacgcagaacgcagaaatccgaagcaagggaatttcgctgatcaattattccctgaaacatctccacttgatgtcgacatgccaggatctcaacgaagatgaacgaatctcatggcgcgaccgattcgatgaagctattcagcaaattgtgcccatggtgacagctctctgggccgaagttcaatcccttttacgagtttgggacgactactttggcttcttattgaagctttgcaactatggcccggagattattcaggtcttactcgatcaaggccatttcgctacatgtatggagattctctggatcgatgaagaagatagcaagaaattgcggatccggtatcccaattacgtgcgcctcttgaacaaaggacgtcggttcaaccatctgattttgctgtcattgtgcttggtattcttcaagcacgttgacctttcgctccgtccaacccccattggcggacaacggcggtttttgaatggcaagttctcgaccagcatcagagaaatcgaactcatcaagcctgttgaaaatgatgggtctctgtctatcttgctgaagcttctgaagcatgagactcttgcgaggagccagactactcgcgcgatcataggagtcctgttagacggagagcctgatgcaggtttgttggattcgattcaactgacactggagaatggtgtcagactagaacccgctatccagtgtacaccattcctggaggcagccacaacgttctgccagcgttgtccggataagcggcgggtcattgacatgatcgacttcgttgccaagggggtcgaaagcattgacaatagcggcggccaggagcatattgacttcttcatgtgtctttgccgtagtaccaacgagcggctgaacatggactctgcgaattttgcagagattgttcttgacaatatctcagtctgggccccgaccttgctcattgataaagacgagactgtccgtcgcaatatgcagaatattctcgaagagacgatctttaacgataagatcgtggaaggcaacacagcggactccgaacagaatggcgaatggcagaccattatcacaccagagcggcgccatagcctttgccgtcggctgccgaacgcatgcatcgagcggctcaaatcggcattcttgaccgatcagatcagtcatatcgacgccagactacttgaaaatattaccccggtgatcaactattgtctggctactttttacgacgactctgaggcggaccagcaagaagttcaacaggccaatggtaggtttgagtatctacacctagggttcttgcagtctcactaacacactcttctcagaactcatctccctccttaaatcgatgtcgctcgaagatgtccccgatgacccgccttctggtatgcttcaatatctatccctcctgaacggccctggaacatcatctaacccgatacccctagaatcggacgtagcctcagtcgaagattgggacgcaaactcggtgatcgcaactgattccgagatgggagtcgctggatctccttaagacaatggcatttcccgctgcaaattgctttttgttgtgtttctttcccatgcgtttttgcgatgtcaatggattcagcgagcacgatgtgtgcatgtgatcaaaggcaaatcctcatacctcacggattttacgaattcttgctgtgtttttcgccctatgatgattgtggttgttcgtggcgttttcttttgctcatggtgagccggagtaggatttatttctatgaagggtggctttggacggacagctcatctacatgcatttcgcaagactatttccgagcattgagataaatagtttctgtcttgagatttcaaatctttgagtggattgcattcaacaaagttcgtagcgcatcattttgttcattttgttcaatgataagagtaacacgtatctctattttattttgattaaccctcttgctctccgccagctggagcatcgccctcatcttctgattcaacctccacagcagcaagtgcatcctgctgagcccgcggagcgccgcgagtcttcttagctttggggctgccggggtcagcagcgttaggtgcggttgcgagtttagtcgctggaatgccaccagaagtaacatagaggaagtaacctgcggggaagtgatcgatatggttgaagaaagaaccaaagctacagtcaaagtcagtattgccgtcttaatgtgaaatcaaacgaggacgttggttggaataataacatacccagcactttggtcctcctcccggaaaattcgatcatagatctcccgctgcttgaactcattgatctccacctcaaacttctggaaattgatcggctgacggtcaagaccctgtgccttgttgttgtacgcgtcgaagataggccgctcaagcaagaggcccaaaccaggcgctttgggaatagcaatgcgctcaggaccataggtctcggtgatccggtctggatggcagcctgagcggacaaccatcgtagccatggcgaccatcttacggatctggtgcatcatgaaactctgcccatggactttcagactgagccattccgtgccgtcgatgataatcggcgttgtgttcaccttgaatgacttgatgtgccgtttcgccgaggggtcgttgtgcgtcttctggatcgtgtagttatgaaagttcttcgtaccttcgtagcggtcgagacattcttgcaggcgggcgatgcgtgaagcgggagcgcggtaggctcgtttggcggtgaggtatgctgctttgatggccttgatggcatcggcgatggctttttgacgggggtccatgacaaagggctttgaggcctctgcgtcggccggctgtttagtcatgggctgatcgctggtctcctgctgcgcgggttgctcggcgggggccgaagagacatccttctcttctgtgggttggagtgcatcgcgggagtcgtctaggtagagagacttttcgacgatgcggcggatgtcttcaggcagggtttctaagatcggcttgatgtactctatatcagcctcttcccaatagcctgcgacctcttcctgtcgagccgtgactgcatccaactcgcctgccttgtcggcaagctcgatgattttctttccaagataggtgcttgggtgaggcggcaggagacagtgacttggcagcaaatactcgtaaactcgggagtcgcacatctggtagcagctgaaacttttgctggtcacttcgtagccccagacacgaatttgggggctgagctgagcgtttattttcccgattatatcttcatcttcgacaatcatctttagtgacacaacatttccagctgcgtggacacccttatctgtgcgggcacaacggacgaaggaagatttcttgggatctgccgcattggctttggaaactgcgccgacgttgacgagggccgtgaatagatcaccttcaatggtgcgttggtgctcgttcctataccaaacattgttagcgcaaggatattaccttacaccgaagcagaaaagacttacaactgcatcccggagtatccagtccccgagtaccccatcagaagcgcaaccttctttttggggcggcgctcttcgctgtcgatctcctccttggagaattgggtagcgtagatcggcaagctgacatcttcgccgttctcgatcttgcgacgcttggcttcggccttgtcttcatgacgctgtcgcttatctatcgcttggcgacttaattagttagccgacaatgcgaagaacgggaggttacaattgacgcaacatacctccattccgctcgccccatatcgcggttcttacgccttccaccacctccgcctcctgttcctttgttgtcggccattgtatccgctggaagatctctgatagctccgcacgaggtgcagatgggtcgcgccagaaagaacggtaaaattgatgactaacagtgtggttcctggtgttgtggggaagcgatcgaattagaattgaacctataggcgcagttaggatcccagaaaggttccgttggagaatcgaggcacacatgaaatcaattttcggggcaatttgtcttcgactacgccttacgcgcggttcatcttttccctgatatgggcactagtcctataacggtctagtgtgtagataaatcagactagccatatatggtcatatttacacctgaggaatcaactttgcatgtgacgtgaagctccgcgctttgaaccggaattgcaactgtccttgttcagtcaatcaattgcttcagcgcggtctgtcgctcaagcgcaactataattctctcgtggaccccttcactccttttgctgcctttgattgaagcatgcttgtcttgtccactatctgaacactgcgacttatcgccttgcgctccagttaaattcttttccgaccttcttcccgactaccatcttttgctccgaagcttctgcaaacatggagctttcaaagacacttatccgaactgtggcgcgagcattttacgagacccgtcacatcttggtcgttgatgcgctctttctacattcagtgtatgatgagagttgatctctgttgattggtcactttgctgaccagctacagtcttcacgctgaggatctagcctttttgatgggaatgcaacagaaagatcttcgcaagctttgcgccaagcttcgagaggatcgcttgatcggagtgtatgtcacttctccctgacgtgatctacaacaaagggtgcaaaacacaaagctgatctagttctattttgattttaggagcacacgcgccgagatccgcgatggctctactcgcccagtcaatcgcgaatattattacatccccctacacccggttgtcgatgcgatcaaattcaaagtctccaagttgacagctatcatcaaagcgcagtacacaccgagtgaagagcgcaaggaatacatctgcgtacgatgcaaatccgaatggaccgaactggatgtattgagtctggttggagatgaagggttcgaatgtcaaaattgcggcgccatcctggaacggacggaggatgtcaagggcgcggaagggatggaccgtacgggccacgagaaaaacagtaagcttatggcacagctagataacatgctcaaactgctcaagcagattgactcggtcgaaattccgccgaatgattttgaaacagcgtgggatcacaaggtggaggttattcggaaccagaatacacacccagtccgtgccgcgattgctgttcctcccaaggcccaggatatcacacgtcctaatgccaagacggatgccgctgcactggagatctccctcacctcaagcgaggaaaagagtgctgccgagcaggccgatgaggccgctcgtaaggcagcattggagaagcaaaacgcacttccagtttggcacacacattctacggtcaatgcatcccaggttggcagttctcagatcaagaccgacgttggcactgtagtgaagcctgagcttgtggacgaggaccaaaaacctagtctggatgctttggacgacaaggtcgccgcgtactacgctgaaatggagcgcgagaaggaactgcaggctcaagcagatgccagtagtgcagaagatgattcagatgaagaagactttgaggacgtcgaggggatctctggtccaagcggaccggctacgccccccatggctggggggctttcaaaggccnnnnnnnnnnnnnnnnnnnnnnnnnnnnnnnnnnnnnnnnnnnnnnnnnnnnnnnnncagggggacgggctccgcccgccatggctggcggtcttacaagtgcccctaccacatcttctgggggcgctggcaccaagcgtgaacacgaaccggccgctactgtccctccatcatcaattgggactccgtctgcgcctgccgacgatggacctgcggcaaagaaaatcaaggtcgatcctgatatcaagcctgatcctgatgttaaaattgaggctgaggttaagaaggaggccgaggaatctgatgaggacgatgaggaatttgaagatgtataatgaaaccattaaaaaagtcaacattggcgctggcgccgaataatgatggcagactgtggagccctggaggcttgcaaaaccattcaaatcccgcatagccatagaattacattttgcccaatttgcaagacttcagaatcaagtaaattgacaatggatgacgagacaaagcaagtacgttgcaatccagtaggtatgcccaatgaaagagattaaagataatcgaacaggaggagaagtaggagtgctcgctgatgcttttgagcaaaaaccagaaccgattgctgtgctatgtaaagaagccatgtagctcccctacttagaggtataagatgacgctgtagtaactcttgccctcgccggctattgctagctctacaacacaaagaaacgctctatcatgacttggctaaacgtgagattcttacgtcccaattgagacgtccctgcagccatggcggcgcttggtaaaatggtcagccggagacatttcagttgagctcggagtttcttatgttatgttcgaattatatatttaaagtcatttccattatttggatttggtataggtagaaacatatctcagtaaacatgacggcgattgcactattctgcctatttctattggcagctaccagtctttatggcttgggtcgagttgtatacaatgtcttatttcatccactgcgaaaattcccggggccttggatggctggagccacatcgagttggaaagcatacaaggaagttataaaacaagagtcggcggttcatgagctctttgctctccataagaaatacggtatgaatgaatggtatctatgagaaatcctcttgacatttaataggttatattgtccgcgttgcgccgaacgaggtgagtattcataagcccagcagtctacacttccctctctgggttatagggctcaaacaggttacttacctctcacagctccattttggaagcccaggcgcgttccacgatatctatcatagcagcaaaaggtgggacaaggacacgggtctttatcgaacccccggagtctcatctgggtcattcacgttcttgaaatatgctcaggcaaaagaacgacgggaggtgattcttcccattttctccaagaaagccataaatagtcttgagcatctcgtctggcgaaacgtgagtattgctttgcttctgttcactggcaacctaccttttatccattgctaattcacggtttctaaataggcaaatcgtcttgcatcttctatcgcccagacaaatgccacaaaaagatctatcgacctactctacgcattccgttcctatactctcgacactataatgtgcttcacattcggcaactgcgtaaacgccctggatgcgccggcattcagcgaccctctcattctagccatggacgccagccttcgtatgctgcctctcatgaagaacttccctatgatacgagacctcatattcaccgttccaccggccctagtcatgcgccttatcccaaacgcccagaaactagctccacgcctataccaggtccgggatctcgtccaacaacagcttcaaatcgtcctaaactgcccttcgaagctagataccgtgccacaccagaccctctttcaccgaatgctcgacccagaatcataccggagcaaggaagtcctgaatctagcagaactacatgacgaaggcttcacactcatcttcgcgggcgccaacacagtagccgacacgctgctcatgggccactggcatgcaatgcaaaaccagactttgctaacacagctgagaaatgagattttgactgtctggcccgacatcgacaaacagccatccttgacagatctcgagaccttaccactcctcacggcaactatcaaagaatctctgcgctttattccatctggcgtatcgctaacgcgtgtcgtaccaccaggcggcgctgtgatagcagggcaacagatccccggtgggacggtggtggggatggctatcttacatgtgcatcagagcgcggaagtatggggtacggatgcgcttatgttccgaccggaacggtggctggagagttcagatcaggcaagtgcccggaatgggaagagtgaattggatcactggctcgttgctttcagtcgggggccgcgtatgtgtttcggtatgaacttggcttgggcggagatgtacatcgctttcgcgactatggttcggaactttgacatgactattgacggcacaacggccgaggatatgcaatggcgagagtgcattgcagcttactatcctaataggcatttgcatgcgtggtgtcggccggctgggcccgggaaggtgaagtaaagagttggtgcttatatagctttgagtttatgagcaaatacaaactttctcacacgagcaaagtttctatcctctaatatctagccttatgttaggaacaaaattgtaagaccccggtcgaaagaaaataatgggctcgtattttgaatacgcctgcgggtttttactaccacaagtcactatcataaacatagcagacaactagcgaatttctttctcataaccaggtttcgccatacttgatagttctatatgtctaggaaagaaacgaaacagggctttgagagccaatatattctagaatatcagatccctaataaatgccctagtctttcccctatttgcaacaaattccttttttatagtttgcaagctagaacggagttactaaggtcaaggtgagactcactcatcaaagtcggccgctatacttggccgctcctccgatgcttaatagttctgaccagtttcggggggaaagagaaaaaggaacattataaagtccgatgtgctgatttgcgatgttttgcactcttagtatcacggagtagtactcgagtttaggtaggcttatatattcaaaatttccaccaatgactttgataagctaggacttgagtgttatgcccactatcgtcatagaattccaccatcgtcgtgtcgaccacaaagtctgcacgtgaaataggaaagtaataagagaagcaggaaggtctcatatgctacctaatataaccaacccatggcaacaaagagcggaccgacaagcattgcttcagtgtaaccatacatttattaatcgtactctaaacgaaaaaaagccaaatatgtccctgagagcccagagtcaattgtttagaccgtaaccctattagccttcaaatactcataatccggcatagaatctcgcgtggccttctcaagcaactcagcaatctcatccccaaactcgacacgccacttagcaacttcctcatcaatatcaactgacactggagccttgtccttaacaacaccagtcgactcctgcaaagtcgacaacatgatagaaacggtattcttacgaaacgctagctccccaggctcaccaacgtttgtactttcagtcgtctcggattttttcgcagagccagtccactcaaactgcatggacgcagtgtccagaccaaccttctcacagaacctaatcacagcaccgcggttatgaatcacgtcattggcatcaatgaccaaaggcgcgacagactcatcgggctgctcgagacaccaatcgaataacttccgcgtccattccatgctcatattcttgaccgacacacccttaacgtcgtcgtcttcaatgacaccggctttagacatcttctgcatagcacggtacatagatggccaagctagtgccgggtgacggatgatgaaggccagctgccaggtgcgcaggtactcgtccggcatgacagttttgttattggcagagaatgtctgcgagggcccgtagcgttctggcgtggatacattgaactctttcgcgttctcttgctcttcggcgctgtttatgtttcccgtgaagaagcgagggttgaggaaccagaaggcgtgttctttggcaaacattatcttgttgtcggcacgcgctcggctggagtagtcttctagctcgttgaagcaccgttggatggcggctttggtctcgctcttctcatctactgtccattgttctagcggcttgccgatgcgaccattctcgctggctgtcatgaatgcatcgtagaagaagtagcctcccttcgggttggtgaggacattcggttgtttggggatgttgaggatcttcaggagaagattcgaggcggtgcgaggcacactgacgataaggactcggtgtggttgatcattgttctcaggggtattggtagtaacagccatggtggatggctttttgatgtataggatatggtggctgaatgataattaagcttaacttgccgcgaggcaatgagcgtgagaagagatggctacattctggagtcggatggtgtcatctcacttaaatagattcgactcaccctgaccaagcgcaagatcggcgcttttcttgaccaaatttcccctggcccctctttatgcatgcaagtgggccgaattctgacctctatgtggtattcgaagtccgacgcggcgggggttgagcagatagtatttcctaagggagtcggactcggtatcaaccgctccgatcggtgtttgtcgctgttgataaacgccgagagagggtcgacgatgaggtccttgattggactgcagaagtgatcggcaatttacatcttgaagaaacagcaatggtacgaggtatgtctcagacctcggccttcctatcggaggatatgatcagtcgcgtcggatgatacggtccgtggtcactgatcgacatggttttaccttgagttatacacttacgttatgcattcatctgtcaaacatctgtacgtcgtgaatacaggcagtggcagtgtagagtggagcagcaagatttgaaaaattgaggatatttttgattcttaaggctggtctggagcctcgaaggcctagtcagagacaaacacagctagatatcgagttcgaagtacaacatatgaaccgctaaaggtccggtgtctatgacttgacaaggttatcttgtagatatactaagccaatacactaaagcatacgtttccgcaagatatatcaagtcaaacccggctcttactaaacgtactttcaccgaggaaagtcggaatcaccgctctcactctccgccttaaccagactctgctccctcgtgagtgtcgggttgcgaataactaaggcgaaggcaatcaaagggactgttaagcagatacccgtaatacatagcagacgctgtgttttctggtaggcgagaatgacgttgtctcggttgggagtacccacgggattgaccgccgcaaatgcaagaggctgggcgtagacatacgcagcgagtgtttcgttgccgagtctatgattcagttcagaaggcaagacttggttccagatcgcaccggagacagtatttccaagtgcgctgccgatgttgtaagcggcgaggtagataccagttatcacggcaagatctatgggattgttagccctagagtcttttttttttggtagaacaaagcccgttggcgagtactaacgttcgtgcttagacgcaacctgaatgctggcttgagctgggtaagggaacattccaccagctagaaattttcgttagatatattcaagcaacgctggaatctaggtgataactcaccaatacccagcagaacttgcgcaccaatgacgcctgaatgactggagtgcgcaacaccacctcggaaatagatgaggattccgaatgcaaccatgaagaggagggttccggccacgatgaagggcttcaattggcgaactttcataacaatgaggccgagaataacgccagtaataacagaaacaaaactgtaaagagatgtgatccgagtcgcactgagaattgattcgtcgaagctcacgtagagaactgtgtacaggaaatctccttgcaggtaccacgctacacaaatgttaaatctcgaccatggatggatggtatcctgaaggacgtaccagtgttgagcataatggggattccaagggcgccccagacagcacggtctttgagaagctagagtcgaattaaatcggtaagaatcctaaatggcttcaatcatttgacttaccttgaatggcagcatcgggtattggcaggttctctcccagaaaatccagaccgggatcagcaaaaagcctatgataagtggcgcaattaccttcgctgtcttccactgtgcacttacgcctccagcgagggtgaatggaacaagaatacatgccagcatggcaatcaacagaatgtttccgacgatgtccagatgccagaacagttctacagccagtttcttttttcctagcagctggagagagctcttgtaagattcaagtgccccagtcttcttcgcgcgtcggttgacgataaaaaggactgcaataagagggagagcacatgcgggatagattatagcaaacatgccgatgccccatcgccatgtggtgatcttgagaacggcatctgtcaagttgccgctgatccaggtattgatctaaaggagattcagtaaattaatcagttagcgtgtaggattacgtatcgtacgcacaataaacggcaaggccgggatgtaggagaaaagaagacgagatcggctggaagtcacatcggcgattagaacttcgactagaagcataatactggtgtatccaatctagacaatattagacacgggccaagatttcatgagcgtatatctcacctggtagataacagcccccgcagcgaaagcctccaaagtcgttgcgcatgcctccactatagtacccacggtatagaagacgatcgaaagaaggataagttccactctgccgaatacatctgcaacctttgccgcagtgggctgtaaaagaatagtcagctgctgtgatgaattgttggtctctggatatccgtacctgtgcagcagcagcgatgacggctcggagaacattgatggtcgcaagaagactgtgttcgccgtaactctgagtagcatagggctgttcaagacatgaggtgttagtatactccattctcgtcgatatatcttgacgtcagaactgcgagatacgtacctggtacgtgtaacgaacagttccatccaagccatacacataagcgatcaagaaaatagcaataaagaggaagatccgatcccaaaatcggaagtgtgatgtaatgatttcgatacgacgaacacccggactgcctttgcctagcaggctgacaggctcaccaagcgggatggcttggttgcggggctccttcgagtcctcactgacgcggtggtcaacgttggtctcattaacgagggacataataatcgtgcagaatcaggtctcactcggattacctatgtagagaggaagaacataggggaaagaccagaaaaatgaaaatatgactgccaagaaaaaaagtctaagataaaactgcttcctcaatcttatctgatgggcctgtcacctgtctaggtaggtaccgaggcgcgctaggagcgtttgcctgggaaaacgtccactcacgcagctttcatgtggcccacctcgtatagagccatggctcaggcttgctatttgacacagatttcccgctttgggcttggctagtggcaattagtataagtctgtggatattgtatcggatgacttcctattctagcataacaacctcgggtcttaggtgaacgtgaagagaagatgtcatgagtgggcgactaactgtcttggtatactgttataagccatctatgtgaactatgtccttgttttgcaaagtgtatacataacaagaagaaataaagtgaaccctgttgaaccctgtccaggtggagctggccccggattaaatccattacgtaagaataatgcccgcaccacatggctggacgcgtcttggcggccgtgaaagcccacaacatatcagcaggctcgcacggacatgcaaatcttttcatcaaaatattaaccatgttatatagcagtctgtacggttaaggcaggtagagaatgctcgccgttttgccaatactgtgtccagtcgcccaaacttggcagcacttgtcaaaggagtgcgacatgccggtgatatgggctttgcagactttgctggctactccgactttctacgaagcgctcaccaaattgaaaaacctacaaaccctggccatgagagatactctccgcccaactaacgagtacacgccacaggcggcattactggcagtgcttaccgaaatttactaggaggcccaggactcacgggtgagcaattggtgtttggaagatttcatgatggagatggatgatcaaggttaccctcttggcgatgcgttggatccgtttggccttgattccatccttgtgaagtggacttttcactccaaggctgggcgcaagagctggccgagtccacatatttcagccgagactacctcaaggacttgattcccgcactgcgaacatgtaagttgcccaatttcggggcttgtcgaaaatatctattcttacataggaccggtcatattggaactgattctcctgacctatcactcttctatcgattttaataaggaaatcttcacactgccacatttgcaaaaactctgcatcactggcgctaaattttgaaaatttgggttgcaagaagcatcaattgacaatcgtgccgcaagtctaaaagagttgctgcttctcaactgttgtgtgtccgctgaagatctcacgctcatcgttcgatttccacgtgccttggaacggcttaccattagagttcctatgtcactaaaatctcagtacgaggaagacaattatgtattcttctctgggagattgagtttccaacattctgaatccttggagtacttggatttagacatttatgggggcgcagatcacggccttgacctcaacccctttgatgttctcaaagaaatcataatcacccctcattcaatacttggtgatcccgatgaaaaaatgatcatggcacgtagtctccagcgacttacaattcgatacgaggaagggactcgtctaccactgaattctatcctcgaagagctcgagaagaagaaccttcccaatatgcgctctgtgatatgccagatacccgacaatatctgcgaaggtactaccagctcggagatatgcgtcgaggccgaggctttcaaaccaaattccaaagagttaggggtggagctatcaacagaactcgttccataccctctcaccatgccgaaatacgatacctgcccgtgtgaaaacttaacgttcttccatcaattcccctcccatccccgtgtcaaatctcgcccaccaaacgaacatactaccaatacaaccgatgcgggtcacagcaaccctcatcccgctggtgtgatttccttcgatgactatgacccatattatgatgacccatacgagggtaaccatccttccttgtatgacatgagcccacctactcctccccgaatgcctacctttacggattacgatgactattgtgattgggcgtacgattgttgactggaggaaatctccgtcttctctttcagggcgtgccttttaacggtacctatttgtttgtttgtttgtttgtttgtttgtttgtttatcctatattctatcttcggtctttcttcaataaccttcaacatatatttggctacgcgccgccgtgcggattgatgctaacggcgtagcggcctgaagtatgtctacgtctgatttctaggatatccttgatggagtctttgatataactggaagccgtgtctgttctagaaaagtacaagatccagatatgttgtagaattcaggcttacatgtgcgaggataaatatgaagcgaagttggacaattgcaataaaacttggctgtaagtattgcctggagatgaaagcaattaaacctatatttgaggacattatcactatcaaagtcgtgacctgaatgaaccttgtgaaccaatcggcgaaggcaagctatcctgactgagacgattcatctcgggatcataaagcgactctgcctcaacagtcgccttgatgcgctttccaaaatactcgatctctactgtctcaccttcaccaacacccccaggaagccaggcgtaggcaatcggtttgcgaatcgtgtatccaaatgcagcggtggtgacatatccagccgcctttccattatagaacaccggctccttgccaaggatcatcgaccgaccatcatcaacggtcaaagcccgcagtcgccgcgaaggtacttggttggaaaggcgctgaatagcggctttgccgacgaagtcatctttcttatttgcatcgacagcaaatgaaacaccagcctcgaacggattgtgctctgtcgtcatatccgcgccgtaggtccggtatcccttctcgaggcgcattgagttgaacgcactgcgacctccagcaatgagtccgtgtagctttccagcttgccaaattgtgtcccataggcgctggccatactcggcgctggtttggatttcccaacctagttcgccgacataggactttcggatcattgtaacagggatacccgcgagaattgttttcttcaaagtgaagtagggaagtcccttgttggaaacgtcgaccgtgctgattccagcgataacatcccgggatcgaggaccccacagtccgatgcagcatgtgctgcctgtgatatcgcggacctgggtccatttcccgggggcaccttgttcctggactcgagcttctctggtaagatacgccagatctgttgcagtgttcgctccaatttggaacacatcgtcgtcaagtcggagtacaaaaatgtcaccccgaatgccaccgtgatcattcaggaggagcgtataagtaacggttcctatcttggtggtcatgtcactcgtagtgaggcgctgaagcagaccgattgctccgggaccgcgcacctcgaaccgatggaaagcagtcatatcaaacatagcaacagcattccgcgtcttccacgcttcagcggcagagatcggcgaatggaactgcgccgaccaggcatctcgttcgacaggttgccatgatggcgggagagatttgacaagatctttgtttgcctcataccaccacggccgctcccagcctccaacctcgaggaagaaagcccccagctccagctggcgaggatagaatggactcacacgcaaattgcggggcgacgtacgcggctgaagtgggtggacgatgtcatatatttcaacgaagttctgctgcgcggtctcgctcacgtagtctcgattgagttggatttcttcgaagcgggatagctcacattcagacacgtcgatatccgatcggccggttgtaagtatttgggctagagctcgggcgacgcctgctgagtgtgtaacccatacggcctcggcgacgtagaagccgtcgaggtgggatggttggccgaggattgggccaccgtcgggtgtgaaggaaaatatgccattgaaaccatctgcgatctctgtgtcccttagagcggggagaagctcttgggaatctttccaagccgggtcgaaatcttcggttgtgaaatcaaggcgggaaggcatgttttgttcgtcaacatctttcggagtaaggcccaatgatgacgcaacgacgggcattggacggtgtgcgtaggatccaatgccgtactgcccgccgtgttcacggtagtaaagacgcttgtcctggtgccggaggattggtagtgcggcattcattccattgggcaagctgttaacatctcgtccttcgagagcaggtactgccgtagtctttgcatactggtgccccagcgggagcaaaggaatttccacaccgaccatggctcccaattcaacaccccagaacccagcgcaagaaacaacaatgtctgcggggatagtgccctttggagtagtgactccggtgacacgtcgaccgtccctctcaatccccgtcacgggggtatggcccagataacgaacaccggccttgctcgtccgttcaatcagcagttgcgttgctcgggctgctagtgcgagaccatcggtcgggacgtgcagaccgcccaacaccatatcggtattcagatgaggatacatcttgaagcactcctcggcgctcagtagccgcgccccgattccccatgatgaggcgtatccatgtttccgcttcagctcctccagtcgtgcgggagttgttgctatttcgagactgccgacctgattgaagcatttgtgtccatccttctctattgaaagaagcttctcggctgtgtatcgtgcgaagtatgtcattgtcttggaggggcttgtctggaatacgagtccgggggcgtgtgaggtcgatccgcccggcatatgcaacgggccctgctcgacaacagtaatatccttccatcctcgagagaccaactcgtcggcgaggttggtacccacgatgcccgctccaatgatgacgacacgttgtgaaagggacattgttatgtgatatatgatagttaggtgttacacgcattagaaagcggcaggcaccgcttctatttgtatattcatatacttgataggttgtacaatatgtgaaattctggtacgtatctccccgcaccgtgtatcggtgtgtgataagtatatagtgtgtcttgaagctgacgataaagatattacaccccgcacgggttccggcgatgtaaagccgagaattgtagtaaagaataccgatgccattttcggagcaatcggaatggaggggtatatcgttggatgccccacgttcctatagataatgaagcttgtcaagtcaatcagaaccggccaaccagctttatgtggagcatttgcgttgacaatggataacatttccttttcgggtcaagggtctcaatcttaggctattttaggatgaagggagcgtcataatttccgcattgaagttagaattattggtttgcaatcaaagccgcatcaaattacagcaagtcaagtctacatgttggacggtttatggccgaaagtcgcgttctgaaggccacgaaagcagtgtatcgatccgggtcatactttgaagaaagcaggagtgtgccaaacatattgtagggctttgaactatatatattgagttaatactaatagatagctagttgaatctaatcactagctatccagttattttacaggagatccgtaggaaatagcaagactcagtctatttgagatacacttactgcttgtctacgtagaacggcgaactctgtgcacgcatacacgcacttaacttgtgcctagaagacgctgtaaacgagttcctataagcacgataacttcatggacagtgctgaaagaggcgatcatataccctcactatcaagcttttccgttgtagtcgattgcgaaaataaccattctagttagtttacaaacacagacccacagtctcgattgaccatagcgtatggtaaaagttcttgattgccctagcaatctccggagattcagttaaaacgtcaaacttgtggtctacaactagtatttaagcaacggtatccgagctttaaacggatctaaatgtttagattcgagctagctacttatagtaagataataggtgatcgtgcaataaatcgttggtaatgaagcattgtcattggcagaacattccaacatcatagacgaaaatgatgcaatcgccattctatggcctctgattggccaattgagaatggatgcaggtgcgttcaatggaggcgtggagtatacaaatcggttgcttatagttctggatgtgacatgtatcgccaacatctctgtctatgaacttttatgatacttaatgatgtcctaaagaacatgctaacccccaaactatgcggggctgatgttcgatgttcggcgggagccgatccgtgggggaacccaacaagaaacaatccatctgagaccttcaccctttctcaagagaaacacctcagctggaggacagcaatgctatcatctgcattcttcgcccatttctcatcatgaccgagcctggccaaactcctattcccgaggagccacctaacgcaatcctgaccgactcccacccgactcccgctcgcgacgcccgcgatgacaacctggaagcattagagctccatgagatccaaacgcgagaagacaatgagctagactactcaaccccatcaggttcatctggcgacgagaaccacgtgcccacacatcgaactacgtctcaacgggattcccggcggagacgcgaagcccgcaagggcctttggagccagatctgtcgattctggactcgaaatgttagtataactgtgccgcagaagagcaatcgagatcactttggtatgttgtactttggacacgctgttggcactctagttgacatgttcaaagccctggaaaggacgttccttgcgtacatccgcacgtccatggttatcgctatgcaaggggtgcttgttgctcaacttttccgtctacaacggccgttggaaacggtccatcgcctgtcattctaccatgtcggtatcccgcttgcggttgcctgtcatgccgtggctgttatcgtcgccttgataggttcattccgattctggagacaacaaaatgctattgctcgtggcaaagtttatgctggggggtgggaattaaattcagtggggattttactattccttgtaagtcatcactaggacgatgctcggcctctgaattctaaccaactctacaggtcattgtggcgactttggtacttaccgtgattatcttgattgaaaccaacttgagccccagtgttctttctaatcgaatatcatggccttgatgtccattgaaatggtgaaggaaaattttacccaagatgagcacattaatgagcatacataatacataatgaataattcatacttgtgatattattctatgatccgcatgtttttcaaatccattgccgttcaaagctgtctcgctttgtcgcagattgcattcatttctaccttcgagcgttctgttcaatgagatcctcaatgggaacaagcgttctctaggaaagttgcgtgaaccttacctacttgttggggacgcctcccaaacagccacctagcctgcgtcttctggtggcattccctcccgagcatgaatatttgcgccgtgttggcatccccaggcagcactaccctgtcacccattgggcaagggcaagaagaagcgtatgggtgggtatcttttatacataatcaacattccatatccccgagtatggtgacgtttaaactgcctacggccctacttagggcatatattacgctccaaccccccgaatcaacctcaattacttcgacacccagtagctggcacattaccttcaacataatcacacccattggctgtgttttcatgcttcttgatcctgctatgagtaacaccaatggcactgccagatcccaaagtcctgctgcaggtgaaaccaagcgaagcaaccatgcaatgtaagaaaaggataacaattagcatgccggtggttttccgcctctgtcaggtggagagaatgttacgctttttcttcatgatcatcgaaaggaaaatgagaaagaaccgcagtcttctccatatccgtgcttgaatattccatcaaaccatccttgatgctctggatgacagctctactccgttcaagttcatcctcatctgaaacccagccaagggcatctgtcccgattagatccctcatctcgcccaattcccgtagtttctcctgttcttggcgataatccgccgaacatttctgtatctcttcctcagaaaagtgaattggacactcagcagatcttgtctgtgctcctccatctagcgacataggccaattcttgaggacctgtagcataacatactttaatgaggtagagtctccctcccacggagcctgtgcatgatgaaaaagcttcgctcgaagcatataattttcggttctgatggcgtcaaaatgatccggtagggatttcatggtcaatgcagtataatagaaatggacgatccgtctccgcatcgtctcttgaacagtttcctgttctttatcgctgagttgatcaaaatttgccggcagcttgacctctggcttagacaatgtctcggataatggatcgccccagttttgaaaatgttcggggattccagcgcataaacagaggggtagaattactgcatgttgccagtcaatgacccctaccatatcattagacgtattcaccaagatattattaggtgaaaagtccggatggcgaagagtcgggcgagacatacggcctgataggacgtcgaggtagggcgctaacttcaaataattggcaaggagatattggtatagaataggcgagaggctttggaactggtatatttctcgtagatatctttcgacgtgtaggcgtggtttaccaaatcttttatagaattctatctcgcgctttgcgggtgcttcgaagtatgcggaaaaggtagtccctggctcaaagtcaatattactaaagaaataggaactcctagatagagacttacatgggccacggtcaacctctagagaggcccgttcttgataccaccattcatgctgtacagttggtccaacgacaatatcgtctgagattgggataaagtgttgtgagctgtcgagatcacggcggtaataaagacttccgcttgctgggaagtggatactcataaaccgtctctccatattaacaatctgtctcattattttgacccgagttttggtatccatagagaaccactggtcacttaaggggattccttcaagcctttcaagtagaatatattcagttctaacgggatttgtctgatctggagaatacgcaaggactttaggggctgggaccccatgagcacgtagatgtgtgagtgtggcagcttcgctagccaccacataatgtttcggaatagtagtcttgtatggcaaccttgcaagaactgcatatccatcattgaaggtgagttgcaagacgcggttgaagcccccctcggcgagttttgtgatcgaggctacgccatcgaggcgtcgaccaacagaatggcaggctgcccttacaagggcatccacgtcaaattgaatacagcgttcagcgcggcggagcttttcattaaatctagtttaacggagcaagttagtttatcgcaattgacgcgttcagcaaccgtcacgactcacaaaaagcgcccagaagtgtactcgaacagatcagaattactactcatagaggacattcttctgggtaatgacttcgggtatcgaccccaaaacctcgagaagcgtcgcattttcaaggagagggccagggtacgcacccagctacatttccaagcttaactttaagttacccgtggacccgccaacatgggtattactcagcactaacgcctcaggtgcccaccgatagacccttgtttccaaggggtcaagtgctgaatcagcatatggccggcctctgtatgttgtgtaacgtgccaggtctaaaagagaacagtgcattcaattcaaaataactaagatggagagaaataagaagcaagttggaaagtgggcagcagccagttaatatagctgaccacttccaagcgttgcaaacctcgaacatctcgttcagctatgtaacaaacaatctatctggtaaacaatgcaaacagtaggcgagcaagcaaacatgaagcatatgatagcgatccatgtggattgtgacatgttgtagttaattattttgcgatgaggaatctagctagaagggccacgctcaagaataaacattgtaaagccctatggattaagaaacacttttggtcttttctaatgaagatacaaaatacaccgatattttctaatgaagatacaaaatacaccgatatcctttcaaatggtcagcgattagaactctatggtacaatatgaggactctcatatgatactcgggccacattgggctaagtattctaagaagttggtaaccaactatctgacgcagaaaggtaggtcaggtcatcagatttagcacgagggatatggtatggacatcaatcgcaccaccattgcactacctgactgattgcagtggcccgtataatagaccaaaagaagacgttcagaccaatcatcactgtagcaggggttcttgcagttgaatggggctgggcaaggctaagctccggaaaatgccttttatcttctattctctgttcattcaatgaaaagcaatatactgtcttcgaaaaacatatgagagtcctagattcatcaaactaaatggatacaagacccagaaggtttcaggcgacgatagccttccttctcatctcttctcctctcctcctccctcttctctttgctgtgttatcaaatgaccattttccttgacgactaggactgccttgtcacagtgagaatggaacttacaaagctttgtaaatgtaggaatagctaactgcccataagccatgcgaagaggccagatgatatttatagggattatgacaggacggcataagttacatatcgatgtagacgaacgaagtaactgggacctgctttgcatcatacacatggtcagtttattatgagttgagttttctaccaccgaaattgtatgctcgtcactacaaagtacacacgtactgcatatatttttatgaagaaagattatttggccgaagatgcatcggaacaaaccttcccgagctctatcgaactatgttgtataataataatcggccaagccaccgaacaaaatttgacgtcggcgctcggttcccgttcgaaaccgtttcaaatagaaacgccccataaggtcctgtaaggcgagacgatcattcacccagccccatttcgaattccgacctttccgacgcagtgaacatcgacgattcttgccacttcgggcattagaccaggacatttgtaggcagcaaaggcatccttcctatacgatgtcggatcggcgagccgtgccgtcacatagcaccgtgaaatactacaagatttgtacattgtacgttgtccctacattgtaagctcagctgtctaccggaagccctcggtccgcaagcggagctaactggaccccgcggcattcgaagcggagactcatgccgggcatgggagtgtggaacaggttatcgtcaaaacgggctgataccgcaataacccaatacgaagtacggagtacggaggagaagaaagccacaacgctcaggggctggatgttgctcggattggcagttgatagcaaaaggtacgttgaatgagggaggtggggactccttatggacacttgtcagatgctctcgcagacaaggcggtccgagatacctaaaaaggactactggtcatgtcgatgtattccaatactcgcttatttagtttcttggcgcgcattgggccgctcggatttccccaaatgcgttgcttcacgagggtgggcttcttggcaagtggcgatccagccttattttttggatgtggatgtcttggctctttcaggggaaagataacgggtcatttttggactcgtttttggtaataccatatttgaattgatggctgttttagtaggacctcggaagtcaagagttgtcacgcctcctttttcccttctggggttaattttcaaagcgagtcatgggacttgagttcatctggggtatttggccatagccgcttgggcaggctgcatcacttacgtgtctagcaagttgggtttcattatcattggttttatacaagtcattcgggtattgattttatgttcatatgtacatccgaaattatccacagtcactgatagttctcggcttcgttgtctccatttcatagagaacagaagccagagagagaaaaatgaaacaccaagaatgatctgagcaaatatgataaaagtatgctgaaaggaaagaatcaaaatgtgaatcatagaaaagaaaatgcaagatatgagaaataaaacagagtgtcatatagacacttgacagaaagcgaagaccgccagggcattgcttcttaagaaatcattccaacgtctttaccaaaacgctccaaaattaagctgtctgcataggaatgctagtcatgggcagctggggcggggcctgctcaccctcctcgaacatccacttctccaatttttgcgccatgcgtgcgcagaaggggtcaacatatccagtccacaaggtggcgcagaagtagaccagcacgatccaagcggggatactgatggccacgacccaaggggcgcggatggggatccagtgcgggtggaggggttcgccgtcctcgccgtatatcgggttgcccttttcgtcgacaatgtcaccgtcccagggctggccggtaatgccgtaaagcatccagcaaagaacagtgcgcaagagagtgccgtgcacgaggtaaacggcgaaactctgcttgccgagccagaggaggagacggctggagaggaattccttggtggagggagagatgtagatggcgaaaattatgaggtcgacgcccaaagcggagtagcgtctgccgacgttgacctccggaggaaagatatagtgagaggcccgttccatgtaggccgaccatgtagcccattctgggtgttctccggggtacgagcacacgaagagaccgaggcagaccaagaggcctgctacgatcttgcgaccccagctgtggcgttcgacgaattctttgaaaccgttctcataagagagatcgctgaggaacatgccgtaaactgcctgcatttggaaggtttctgtctcttgattaggaccaggggtggggatttgggtttcgcgtagaacttaccggtgttcttggctgcgttctggtggaagtagaggtacatgcctacgtagatggccatgcggaatcggaacttgcagaacattgtcgcgcagataaggacgtaaaccagcatagatgcctggagcagcggaagtaaagcccactggtggtcatcgtacgccatatagcccgtggtccaaacttccaggaaggtcttgaacaaccgcacaaactcctcccagaaagtaggcgccagatcgacggcggcgtaacggcaccaccaacagtcggatcgattagcggcgacgaaggcgccaaattgtgccatgacccacgagatgagcaaggcgatagtagcggggaagatgaggcgaggtggacgacggaaggcactcttgcccacggatgtgaaggatccaaggatgtcgccattgcgagactgtttgagcggcttgagggcacaaacgtagccagtcaggaaggcgaagattgtgacacccaaacggccttgccaaggaatacgcaagacgggccactgcagaattcggggaggggagtcaacatcgtcgcggggggcaaagagatcataatcccatccgcgggtcaggtgagtgaggataactaggaatgaagcgattcctcgtaggccctatccacgatgttagtaacaagcctcatccctataaggctgagatagataacgcacatcaatccacttcacacttttccgcggatcacctttcaccgatggatctgcggacttccagggaatgttgtccaatatgcgcgagtatagatgggtgggctgaatatactccatgatgagtgttgtaaagagtgaatgagaaaccaaacaagtccgacaggagactcggagtgtctagtggattggttgaaatggaaagccaaatgcaaccatcaacatcgaacgacaaagctcacaaaatgccaaacaaaacaaaccaaaatgctgaagattcaaaggagagaggaagggacagagatgaggttagctcaagttactgagagagcctccccatagatcaacgagcgagaagtttcgaaaataaataggccaagacagcagaacggggtatatgtaagagaaagccgaattcatcttccctttcccacgagtcgcggatcttggccaagcggaaaatgggtacgaggcgatcgaatgggcgtgaactggaacttgggggatttaccttgttgtatgtaggtatcgccgtggggcctcggtagtggagccttgaaattaccagttcaatacctgtgaagatggcgaaaatgacgaagtgacgaaagtgaagtaaagtatacgatgcctaaatataactggaggggttgtgccatgttatgtttgcagttatgtaaatgtcgataaatgatactacatcagaaaagagctggatatacgtatattgtatgtatcaatctacaacatagggatgagtattgcctccatagttacagcatatgtacgaatactccgtactcgtacgccatacgccatacgcatacaaacaagggaaggggcgtaaattgaagctatctccagccacgaactaaaccatcttatgtagaagctgacgacgctctgcgcatcaattgagctagtatcccatctgccaatcaacacgctgtattttccccatatgaaccatgggctaaaggccgcctcaaattacgccagatcttggcattgatcccacgcagcccaggtctgcaacctgattggccagggcaatcccaacggcaaatcggaatcggggcttccaattgatttaatttctttttctggaattcgatgcgcactggcgttaacgctataccacttcgattcggagtaaggggatggaatgcaaccttggaagttcacccctatttcttatttccgccaaatacgagaacgagagggcatttcagtcgggtacatcctatgctgtatggatgtatgaatgtatgggtgttgtatatcttctatggatgtgatatggagtacgttgtacaaagcactccatatggagtaagtcatcacgttatctgacactcggactccgtgaagatcgctggtacctcgggaacttttcgaatatcaccgtgaacgcaggaatggtaaataagagccattggattctacagataacaacattccgtccctgggaatgtaccgttgaacttgatttgaaccgaatgaatttgaaacatatattgtaactcaataatttcgtattcaaccaaccaggcggagcaaactcttggcttcagtcttcagactctactccgtactccatagagctcacgagactattgaaaaacgggtctactcaatcacatgacaacgttgaagctggctattttaggtgatattaattacttggtaagcttctcaatcttaatttagttattacaagtcaataaaatagcatagttttactccgaggatacgtaagtggtgcacagcaaaaaaaaaagacctcagccctatcatcttcctgcgactgtgtcccgtacaacatacgtgttagtacgaagtctctttgtctctcggtccttggcgacccatttatttagaaaaccgaaagtctaagcggttttcggtaccccgtagtacatattcatgttatggtacaagatcgtctgccttgtggtcagaggtcggcagccaagagtttcccctgcatgacggggagatatgtgtggtggctgtcgcatttacgcatacggagtatctacgtattaactatctacaacatacacatacatagctaatccgtagtatgttctagaaccggcatattccgcctcgtgtggaccggtacccgcttttcctcaatccaaaaaggtttaagggtctcgggaaattgatcagatagggttctccaggacctccagggctgtcaggtatcatacccagtaatacacgtgacaatacacaggtgcttggcaaagtcgggtggtggcgggccaagatcacgcaattttagtctcaacccgacacatccatttagacccatctgaatttaccccctagttcaggagaacttgatggcttaggggtgtacgggacaagaatatccagaatccacaactttgtcacttccaaaatgcggcttgcacgtacatttacgaccttgctggcagctgtggttgcttcggccaccattctcgagaacggtcaagtgagagagaatgcatatcccggccagttacaaccggtgactttggacgattcatggaggaactatcccgcggatgccccggagatctcttacaaaggtcgatgggatagtcaacacatctcttgtatgttccccgctcctcttccccggattctggttttaaccttaatgctaaccttggaacgaacctcagggtggtcgtatgtatgactcgctattattttgtcggctttactaagtaatgatacagtgcaccgggaatcaaagtcgagttctctggggaaaaggtgcgtcttgtttactccgattaaccttaaaaatggggtccacatcgtaacatcattctagcttgccgtccacttcggcccaagcaccaacacgggtgttctggtggcctaccggtatgcatacatctcactctttatgtattcattgtgctaacccttgacaggattggctctcttgattggcaattctctaatatcaccgcctcctccacatatcaatttgttggtccgtggtcagagctcaaagatggtgatgaacccgtcgacaaaaatgtctttgagatgagaggtgtgtatcccaaattccagtggtaacctatatactaactgcattacagtcacaaattggggcattggataagtctctccctgtcgttcaatctgttcgttacttaccgtccacacagtccaaatcgctggtgttgctgtcgcgaatgacgccgtccttaccaaggccccgaccttcccaaagagagttgagattattgggggctcgtaagtttccacaccttgccagctagtcttccatgcaactaactgtccccaaggcttgcatctggacaatttgccacctacgagacaatctcctcgtggtccttcctcttcgctaacggcttaggaaatgtcgaatacggcatcacggtcagtccgctcccacctggatttctgaattccgaatatgctgacaagtctcgcaggcctatcccggcgtgtgtctcgccgatgaacaatgttacaacggcggctctcgcggtgtagtatgtcatcaacctcccatttcccctagaaaccccatcatcaactaacaacgccactagggatggtactggcaccgtgcctcggacccgggctctcgtgcgcgatcaatctacgaccgcaatcccgagaagtgggacgtcaaggcagagcaaccggccgatcttgtgatcattcagatgggcggtaacgatcatcgccatcccaacgaaatccccggcagggattactaccatgcctacgtcgacttggtcgaggatatccactctaactggcctaatgcaatcatcatcctcatggtatgtacctcttctattcacagcttggtctgtaaatggtccatccgactaacttcaacagtcccaatggggaggattcaccaaggaaggaaagaagtacgtcggtagcacttactaccaggaagagaccagggaagtcaatgagcacttcaaagaccgtggtttcgtctactatttccccaccgagggccttctgcagcataacgatatcaaccccaagaaccatcttacggatgtgggacatgttaagattgcgagtcacttgttgcagtgggttaagttggttctcaggtggaaccttgagcctacgggcgaagtccaatctggaactacctactggaacgatcagcaggaatactgattgttctgagatactgaaattggggccgggtggttatctggcctttgtacatttatttattgatactcggcgcggtgtagataaactgcaagaacatatagagcatatatggcgccttttggcattgtactttttgcgcatttaagtttcctattcgaagtcggttgaatatttattaatatttgaaaggaaggcatattattaggtaaagctcatatatataatatataaccgttgtcgtaatatatcacggggatcctcaaaattattccactttagagaccgttaggaccccataatccatggcggttctacctacccaaaacactcccaattccggtggcgcactctaacgagagagataataggagtgaaagtactatgtactatgcaccgctattacaaactagtgtttatccaaaaagcaaaaaaaaacaaaaagctggggacagagttattggatcgacgtccgtacccaagttgtttgtatgccgctattgattaccgcatctggatacctccaagaatagggcaggagtcatagtcaccaaaataggtaggtatagtaccaaagatattaaagtggtgaaagctatttcgatccaccccgtatcaactcaagcgttgaaatattgcatcaagcggggtagtgtgtgccttgccatctttatccgatctatgaatgtcatccccaggctgtgtgatgtggcttgcatcagtgtttacccaaacaggttaattctccaatttattttcgtggtctttcttcttttcctccgctgagagctccggtgtattcgaaattagctgcacatgtttatccagtggatagcgccgtaaaagactgactggcacccaacaatacttttgcggtgcacctttcaagaacccttccaagatggccttctccaagctgataggatgcttcaacatccatagcttgattatttcgtagccatatttggacttcttcgtacccgcgttgaattccgtattgccaatcccgccgtcttccggaacctcgcctggaattttccctggggatatgcgagcgacatacgcgatttgcttgacggggagagtggtgtagaaccagatgcggtgaaccttctgcgggagtaggtaaccacgatattcatggttcttcgcgccagacgcgatattgcccatgtgctcgggtttgatgctcatgaagatatctgagctcgattttgccattgcgagactcggcatgaagtgtccaactcaaaggtattagatgatctcttcgtggaattagaaatgtgcagcacagaaaaagctcaaaaggtttgatttggcggtgagtgctctaatccgaggtcagttggtagtctgatcggcgcccctcacagctgagaggatagtcacatttggcctgaacgcggatgaaaaacagactgtggaagagccagaaagtgctaattatccatctcaatttgctttttattgagattatcactgtgaatcagttggtgtttggggaaagcccaagtctccggaattttggccttgcgatgaaatagtcaaatctgtactccatacgagcaccaacacaagcctaacttccaataattcatgcaagtggctttcctctgtgccacgacaatgtttgagtcaggcaagacgacggagaatggtcaaataatagcatgcaccttgacttaggtcattggattgtgaagctggtcggcagcgcttattgtactgagacgtgggcctgaagatgtcatcacgggcggcccggcgcttcttagcgtgtgacgctcctactttgatgatgtgcatggaagttgggccatgggattgcactctttggtgtgtggtgggaaggacgactagggtcccggctcccgatggcctagtctccgaacttcggtccggtcgggatttatgtacatcggcctttctgggtggagatgagagttatgcatagatctgggatatagattgtataaaaagagatcgactgctcttgcaattctcataattctcaagtcgactctaacaaggtatctctacaaatacctaaattcaagactgaattgaatatctcctattcctcctattcctcctatcctttcccatcattttatgcccaatagggcaattgccgaggtatccagaacatttcattcgccaagccctttatgttcttcccaacgatccacatgccataaaaagattggtgctggagatcaaatagtcccaaccgttgttgttcgaccaatgctatatctcctgcaccgggataacttccacattaggcgactggccactggagcagattttcttgtctttcttcttttttttttttaagaacactggcatataacaagaccgggccaacaaagacttcaaacttgtcgcacttttgaagtaaagttagatcaaaactatccccttgcgcaggtattactctgcagcccatactttcacaatggttccaaaacccattccattcccgggcttcaccccgatatctgatcgagtataccttcgcaatggtcacgagaaggccaaaccagctccagccgacgagccaacaacgattatcatttccggctggggcgacggcatgccgaaacacgttaccaaatattccgacggctaccatgagctctacccatccgcgcggatcatcgttatcctatcgactaccttccaggccaccaaccaaccagaggaagccagaatccaggccatgatgccggtcgtcgacaccgtcttccctacgccaaccggcagcggaaacgaaaaggagcgccttctcctgcatgccatgtcaaatacaggcgccattttcactgcctccatcgtcgtcgcgtatcagcgacgctatggaacagacaagccattcccccacgagctcttagtgctggactccacgcctggaagtctggacttcacgtctcaggttacccggtggtcgcgtgccatggcggtcggcacggccaagttcttcccttggcccttcattatcacacatggtctgtggtatgctttcctctgggcgaatttcctgtggcaactcttgagcggttccgtgtcttcgggcgtttgggcggatggaatcataaatgataagtcttgcgtcgcggccggttctagcagggtttacctttactctaaggaagatgagattattggttacaaggatttggaggagaatgtcgcccatgccaggacattaggctattcggctgatcttgagatgtttgagggctcgccgcatgtcggccatatgagacttcatcctgaacaatattggaataaaatttccagctcatggaagcaggccattgcgaaataaggtaccctggggactggatatattgcattttgcatttatatttatagcttagaccatgtttaataattgtatagagcgatttcattgatagtctgattaatatcacttgctagtttccagaacaaggttgatctccgggatgtcgattaagccctgcgatccgctatatcggtacaagacttgtcttaggttatacttgtttatacaaaaggaactggcaagatattcaaaggtagcaattcgtaagtcaatagatcagcactaacaatctgggccttccaaggcaatgcgaaatgagtacacaaagacaacaccacatccactccactctggaggttcaacctaatcacgatcatcaggatggaaaaccaatgctcgcacttcaatactctctcttcccgcttcatgctccgtttccgggttaacaaaagcagtatggggcacacgacgagctcttccatcaaccttggaatcaaaacatttgataagtgtcaccaggtccggagtctgcccatagcggtaataccacttgatattcggatcgggcttgacggcatatgtctcaccttcgcggtctgggtatatgagcccgatgggaacaaggtcactatctgggactgagtgggcatccgccaccgccaatggatccttcaggatggttttgatcggacgccagacgttgatgatctggtatcggcccttgaggagctcgggagcctcgtctgggagatggtgggagactctgtttttggacgcagtgtaggattgatcaatgtgtacgcgctgcacaggtccgcggagctgggtagtaatggatctatcagtttgggcccgtcggatggtatggtcgaagatgaagatacgagaggcacccgtgctatgtaggtcattgttagtttcatttgagtgatgttgatggcttcaggagtgcatacgcgtctttaagtagttgttctgtttccgggtaatattctctcttgatcttctcatcgtctaggaagtctttctcttggctttcgtgatagtaaagctggaatccatggctgtctagcttgtagtccagctcatggccactgatatcgtggatggtggtcacgagaggaaccactggtcgatcataagtctctggtttgccaacataagatggtgccgggggagagccatcttcgttctctttgtagaagttgagtgtagcctggacatggtgaggcttttcggagactgggactctggggttttctgagagcagagagccgtgagaaccaggaagttgaacagctgcagaagccatagtgagttatttgcgttgtaatttaatggagcttggaacagatgacttcgatagatggttctttatatagcagtttgcggggtgagttctatttgtcagaatacagcacgcaatattcgtatgacatggagaaatgctgataaatgcatagctttgagggatacaagaatcaagtcgactggtaagccctgcagtagtaccagatggtacagatggaattatattattaattgacgtgcatatgccatttgtaatctcgcattccccggaagatcatttggtgattgagatgacgccactcgatatcgaatatacgaaaaacggcattggccaaatttaaccaagcattcattctaatgtagttgattgcatttctttctgggtaggcacagggtagatgtgatatgaaaccaacaatagtgcgctcctatgaagcccatctagtaatcacgtggtttatactcccatgagatgtgttaaaagatattaagtaaacagcataaaccacactctgcagttatagaggacttgtctttctatagatatttatcgctaatcttcctcgaagttatagaaatcgacctagcatggccaccaaggtcctccgcccaacaaagtcaaaagcaacgccgtctttcccctcctcggcagtctttcacccgcatcagatcacagcctcagcttttaataaatccaagcgggggctaataggatcactttatatttaagcaagcatccctagagtcttggtctattttaaaatccctgtgcttcatattatccaaccccatcaccatggcagtcatccaagcaaaatggaccaaagtcgtcgaggctgaggtcttacagcgatcgtcccaagtagtctccgtcattgacggacaggtttacatctttggcggggagttgcggccacgggagccgagagacaataacgttcacattgtttcacttggacgtcgtgagtctccctatttctacaaaaaaatcccaaatctgatgccagcgcatacaactaacagatcccatagccgcaaccctatctaccaagccatccaccgacaaatccccttcgccgcgagtcgggaccgcctcggcaaccctcaatggcaaaatctacctattctccggacgcgggggcgcagcaatggcaccggtagaagaaagtggcgctatttgggaattcaaccccgcctcagacgaatggtcactcctatcaccatccgacgcaaacccgtcctctatcccggcagcgcgcagctaccactgcacagccagcgacggcaaagacaccgtgtttatccacgcgggctgtccggagaagggccgtctatcagatctgtgggcattcagtgtatcccagaagcagtggacggaacttgcttcggcgccggatccaccacgcggtggaacctctattgcatttgcccagggtaggttgtatcggatgaatgggtttgatggggagcgggaacagggtggcagagtagatgtgtatgagcctgaaaccaatctgtggagctcgcactcgtttgtttcagatggtatgactggaccatcgccgcgaagtgtggcagccttgcttcctgttgttgtttctggccgtgtgtacttggtcactctgtttggtgagcaggatcctagttccttgggacatcagggtgccggaaaaatgttgggtgatgtgtggttatttgatgtagagacccagctatggaccaaggttgaggctcagggagatgagcgcccagacccacggggttggttcgatggcgatgtccttggtaatggcagtattgtggttcatgggggacttggagaatcaaataatcgactgggcgacctttggactctcgagtttgtctaatgttttgaagagatttagtttttcaagagaaaatcccgagggtattcaacatcaacaaaaaatgaaatttgtaggagaattatggagttttgaaaagaaaagaacaaagctaagagaaggttatgcgtcatgagcgtacagcgaaagcacaacaagtcaaaaggaaatcgtttgtgcgtgctatgaggtcttgaatcgtacagttgccatatttgcctgcgccattccgcaacaattcataagaaaagataatttgacagagcgaaagaaaagtcaacgagtcgcaccatacaccagcaccatgaggggaagtccggcggaaggaaatgaacaaaaagagtcaatgactgtcatcgcaaatcggaagcaaaaaaaaaggagaattgacatgaaacaggagaaagacctcggaaagacaaataaaaaaagtgtagtagttattgtgacaactgacatcatgcacaggagaagtgaaaaatgttctgcgttagagttctactcgtttttggagtattgcttagaacatgagagagcgggttttctgccgacgtgcttcgacagtacccatctcgggttgagaatgagtgtgcttgtgtcgaggacgtgaggattgaggcgccggcgccccagaccccgcagaagatggaggaggtgccatcatcgcactgttccggctccgaacaggagatggcagtgaggcaggtgctgtgggaatcccagtgggtggacgacgaggcgcagtctcattgctggctttcatgctacgctcacgcttgagcacaagatcagcccagggtttgagtgcaccattgccggagctagagcccttcccaacagcttcagacatgactcgaagccagccctccttatctgcggggctatccgcatagaagtcaatcacttcaccattaccaaaacggatgcggaatccctcttcaacaaacatgtagccatcctcttcttcggcgaatgcagacttgcgacgggtaccgcccttcgtgttggtctccttttgaagtaaagaggatcgatcgtcaatgagcttggaggccttggctagattaatggtagcacgaggttggcgcgttgtttcgtggaaggccgttaacttggatccttgaagcttaaagaagcgacggcgccagtactattgtgatggattagttttaaatcgacgatagaagacttcgtaagcacttacaggacaatctccgccctgttgggaaaggaacccttcccagcagcgagctgcaacactctctgcatcgcgcaattcacgaatacaggcattcatgctcttcggcatgtcttcatccttgctacctttcggcttaggcacgaatagaagttgcacttccaactttccaatcttataaggtggtcgacgctgcgtattaatgctagtcgcactcttcttgctcttgatgctgctcatctgttcctcaacggcccattcgttgaagcaagcaacatcaacaatgtggggacggccaaacgcctgctgctcgtggtcgcttaaagccacataagcgcggccaaagctaccatcacgtgcaaccaagtttcgaagccgttcgtatacgggagcattaacgtccttggccttctgttgctgcgactgcatttgttgcttaatgtcaagctccttgcgccgacgtggggatgcaaatacacggctgagggccgacgccttttggcgtgatggcgatgatgcgggttcttgggtttggaatttgctctcgtcaatcttcatttgcaaggtcaactggaactcaaggtcattctggacgatgagctcgaactcttgtccgattggagctgacttgcccatctccaaccaggaggtggtcacacagtgcagtccgttatccagggtcagtgcaaaatacgatcgttcacctacagttcggttagtgacagtcaattgcagtgggtactatgatagggtcttaccccgtgggagaggaaggtcacaatatttgaggcctatgaccttcacaaataaacgacctcgctcttctccatcttcaaacgattcggagatggttggctcgttctcttcaatggtggctggagcttcctgaacattgctgggctgtccagggagaggtgggactccacctatgccagggacgggctttttcttcgggataccggtggcagacttgatacttgggcgtcgcgctgagccattccaagggactgtggtccaggtctgttggctcgccttgcgtggagaagatccagcggagcgtgtaccgtgcggatcttgggcagtgtgttcggcagaaggcattgcttcttcttcgttacggctgctggcaatgatgactttcgtgttctgtctcatgaggtatcctctctgtttgggggtaggagagtcagcggggtgtgcactaattcctggggtcgcgggatccttgtgtcctattgcctgggaaggcagtaaggaactagggctttgggaaagggcaaggtggaatgcaaccttttgggattcaatgacacgatcaaactccttgtccagtccaaatccaaggctttcttcctggatactgaagggaatgtcgagtttcaaacaactactttgtcgctgggcaagagctgcgggccccagctttggtggcaagtcaatattttcatgttcgggatccgacgagtttgagtcgttggagatctgcttagtcaatgaaggagtgggtagagcgtgttggccactgatctgacggcgggtggcagccatcgactggatatccgcaggggtcagtgagggcctggtcttgaggccagcaccgggagctcggattgttgcgacagggtcaggaacagactcatcggatgagctctcatcatgttccggctctaactcctcttccccctctgcatcttcctcttcctgttcttcttcttcttcgtcgtcttcctcttcttcgtcctcttcttcattgtcgtgttcgatcggatgacgaatgacagagtctggagtagacgcttcggaagcttggtcctggtgcatctcgggggtaagagggcgtgcgagagactgacggatagatgccatatcgaaggactggttttgaggggcgtttggctctttgtattcctgggcaccctcgtttggctgtgcgggcttttcggcgtcggtgtgggtttcagcattgggggtagtctgtccagattcttgttcatgactatcatgcccagcgtgttcgcgatcggcggcttcggcagcagagcgtagcgagtaattgctggcctcatcgtacttggcccgttggtcacgggatgacaagctgttgtctgacctgctctgataataatccgtaatagagtaaaggtcttcatcgcgctcttcctctttaatgattacacttgaggagtcatcatcgtcggtctccgtggatggaatgggaacatcagggtcataatggtcataacgttgggggctggaagcaatttgagaagaggcatctgagctgtcatcctcataactatcacctttgcggattccccgcaagattgagtcgcgagaaatgcgaggtggagaaaagaagttatccttggcatcatctgcgtaagtatcatctttcgatgcaagcgtttcatctgctctaggaagctccaaggtttcctcgatactctcggcgtggtcatcatgtgtctcatcatcatctctctcttgcagcatcatgagacggagtctctcctctatggacccagcgccggggatatcagactttgtatatgcggcaggagctggaggcgtagggagcacacgctgtcccgcgctgccgatctcaaaagcggcagcgagcttatcagcagaggacggacgcgcgccagacatgcgattgaccgatggcaaaggcgggaggggacgtcgctcgccatttgagtccagcgactcgacgcgtgtgtgctgagaagatcctccttcacgtgaaataggtcgctcatcggcgctgtcttcttcgacgtcttcgatgaaaggatcgctatcactgtttgttgggctcataaaacgccagtcttcgggcaacacaacaggagttttctcagcatcttccagcgaggcgtcaaagctatcatcacgctcaatcgatgactcggcctcaaaactaagatccccctcttcttcggactcgtagctgttctcacgtgactcagatgcaactgaggagagatccggtgtcgtcatttcatattcgttgatttgagggggggcgtgatcaaaagtgacactctttgcatgtcgatgtccagcactgccatattcggaccaaatatcgttctggggatcgaatcccttgccataccgactacctttggatagcgaggacttgcttggcgatgcttggtctttgctcgaggatgacgggcgagacatttggctggtatcttcgtcgacttgggatttcgtaacattcatttggctgttccgttgcggagaccgctgcgagcctaatggtctctggggaaagaccaccgaagccgggtcatattcttgaccaccttcgaagaacttgttgttatttttgaccttcgacacgcgtttcaagttttcgagcgacgggcgctttgaggggaaataacacccctctggatcgtatggcgctttattctcggctccctttgggaacggcgatggggagtcccgacctttccaaaacaggcgaggggaggcattgttattcagagacgagacatcatatgcaggcgattcgccgtgtggcatctgctaggttgttagcatgcttgaccacatgcaaagcatcgcgttgacagtaccttggtaacttgattccagctaggcgaattgcgcctctgggccatggggctcacttcggagagtggccgttgaccaggtcccttagccatattgacgttgggtttgctggtgactcaggatgcgaagtgtgcaatcgtaaaacaagactaagacaggtgtctataatgtgtcagtgtttattcaccaagtcctgatcagcgaatgggttcacgactgatgacgaaggacataaggcaaacttgcccagagatcaggtaccatacgtttttaataaccaggagtcgcgtgggaaatagttgccagcgagtgctgatatattcgctgcaaaggcgtaaaggccgtgtcgatcgtggcaagaatgctgcggcaaagcgaaggtaccaaaacaaacccaagttgggtgtctaggtgtcaaaccaaggccgaaaaaaaggggaagggataacgaagggatacgaatgcaaactcccaaaaagaaaaaaaaatagcagggaagagcgacagagacaaagaaagaggttattcagaagagtagcagaaacaacgaagcttgatatgtctctcccatggattcaagtggattgttaccccaagcaagaaactgttgttgcgggagtcgtcatggcaacggcgcgattgtttcagcatcccgtgacattgcgtcaggtgcctccgatcggcgctagcctacaagtagaatagcctcgcggatcgttttcgatgtcaacatgcacctaccaccttcaactgttaaaagtacctaaatatagcacaagattgaatatgtaggaaaactcgaatttgggtatcggagtttcttatagagtcccactattcaaatgtgaagcacagctagaatttgatgtattgtttcctctttctaacaagtcaccatcgattatatgtcaagacaaccttgtaatatgtgtgaggtttgaatggcagcaaatatcttcaccaatagggtaggcatggagggctttaaaatagggaaggtatatctgtagagctcaatccaaggcaggagttactagagactcccaaggtgcaggcaaagctcacacgcatatatgaacttagacgaaaacaaaagccacgacaggccacttccttgtcaacctctctagcatccaccagactatagtggctttgaggtctgtagtagcatgctgaatccggatatatgaactcacccgagagcaagccgcgggggtgagtccgctcttaatatgtaggaatttggatggatccaggcaactatatattccgtagttatagatatgatttacctacaaataatttctctcagcaatatgacagattaccttgagctattggttttagtttctgagacgaatagtcgcacagatttagcacaacagaaaatatgagaagtgttggattactgagaccaccagtattgcaaacaaacatcaacaaacatgtttatgatgtactgagtcagcattttagtcacctgaccatatgccaaagtttgtgatctgcgctagtctgaaaaaggaatggcgttttatcatcgcggaaaaaaaacatctgaacctgttctggcctttccttttcgatcattcagcgttttccacttccgcgcatcttatcggttttaattaggtagaatgcctctgccagctcgctcttcgatatgttttctatgtcaaactaaggcgaccctgcttgccccgtcgattcttccgacgtcatggcagaccacacgaggcatggccaccgttcgattgcgtcgcaaggctgctcggatggccctgtcgcccactgtttccaaaccatctcttccatctcctaacaagccacgacgggaacgggccggtccctttgcctcgatgaaccagacccaggcacggattcgagacacaccacgcacacgatcacaggcggccctcaagcgttcaggggaggagggcaagatggaaaagaaggagagcccattgtacagagctttgaagatgcagacaacgttgacagctgtgccttatggtcgacgttccgctataaaagctcgacttgccgacatcactagtttcgaccacttccctctccttcccgcagttcgacagtcaatattcggccaggctctggccggtctaactgatgttacccccacacccattcaaagactcgcgattcccgaattgttactagatgaatccaagaagaagaagaaagtgaacaaggcgaatgaagatgaagaagaatacaattttgaccagtatctcctggcagcagagaccggttcgggaaagactctcgcatacttgcttccaattgttgatgctatcaagcgtgctgaagtcctcgatatagaggaggagaaagtcctcgaggaacaaaaggcgcgagagcgggaggagagaatgaagaacaaggcgttcgatctggatcccgaggagccgccaatgacaaacgccgctcgtcctcgggctatcatcctcgttcctacctccgaattggtatctcaagttggatcgcagctcaaagagttggcccatactgtcaagtaccgctctggcgaaatctcatcaactttcactccccgccggatcaagaacaccctattccaccccgccggcatcgatattctagtttcaactcctcaccttttgagctctgttgcgagatcgaatcccaatatcctcagccgagtcactcaccttgtactcgacgaggccgactccttaatggaccgctcgttcatcccgacaacgtccgaaatcattgccaaggttgctccgtcactcaaaaagttgattctctgctccgccaccatcccccgcagtctcgacaaccagctgcgcaagcgcttccctgatctgcaacgcctgacgaccccgaacctacatgccattcctcgtcgcgtacagctaggtgtcgttgacattgagaaggagccataccgcggaaatcgaaaccttgcctgtgctgatgtcatctggtcaatcggcaaggcaggagatagacacgaacacaccgagacatggggaccgctcaatgcgtacatggagccgaaggttaagaagattatcgtgttcgtcaacgaacgtgaggaagccgatgaggtcgctagtttcctgcaatccaagggcatcgatgctgtctcgctatctcgcgacaccgattcccggaagcaacaagagaccctctcgcagttcacagaggttaagcttccaccgactgcggaggagatcatgattaataagaagaagaaccgcgccgccggaagcattcccttcgaacttcctgagcgccaagagcccattcgccgccttcccgacacaaaggttcttgtcactaccgatatcgcctcccgtggtattgataccctggcagtgaagacagtaattctctaccatgtgccgcacactaccatcgactttatccaccgactaggccgtctcggtcgtatgggcaagcgtggtcgtggtgttgtcctggtgggcaagaaggaccgtaaggacgttgtccgtgaggttcgcgagggcatgttccgtggccaggctttgatctagatccagatccagactcacgcgtgcgtgcatttatcacattgtataaatcttgtaacatacatggcgttgatttgaggttttgattttttggggaattggaaaacgactatacccattgtcgcgatagtcattggatctttgaaagtatgtacgatatgcaatcatatatgatgaacctaattctcctcttatataacgacgtctgagtccaattgcattgaaacaactgtaaacgaatattttcattataacctcacacgggtatttcccgcgccacccttcgccagaagtcacatctcttcttcaactggatcagcttcacgttctcaagcctatcacccacaacgacgaattcctcgtctgtatgtagttctggcacacctggctgcgaagcgttcgtcaccttgtgtgcattcgggtctcccgtctggaaaaaactcgcgaaagcccccgcgtagccttcataaacgacagggttagtctcttgaacagtgttgattttgttccactggtatcaatcaagtcaatctatgccatcgacactaggaaagcctccagaaaaagagagcgcaacgataaaaaggacgaacatacataaatagtatcactcccatgggttgctggggaaatcgtatattccccaagataccctttctccgtcgcagccgacgcaatccaataagctggacaagcaagcacaacgtcccgataaaccaaaccagcccgaatataagtattattataactgtcaatcgtctcggtactcccttcagcgggataatatatagatttcacctcatcaatctgcttagccgacaacccaggcacgaaactggaaatccaccggtgaaagctgctgacagaggaatcaaacccatcgaataaaacggcgctgtcaagacccggaggaacgaagttctcaccctcgtggctgttgtacattccccagacaaactctgtgttcagggagcccatgctcacagtttctgtgagtgtctcgacaaggaaggtcccgtctataacaggcgcccaggtgtaagaactcgttgtccaagtgttgctcgctccgatgatcaggcttgcgtcacggattttctggatgtcaacagatttgagacaggcgagtatctcatcagcgtggttgtagctggcacagcctgttagattcgccagctgggtgtagattgcttctgcctcgggtgcattgaatttataggtctttggccagaacggcgagctagcaagggcttttgagaatagtttcggttggccatggcggccgtttgcgaggacttgcgccactaccgagccggcaccggctgactggccccatattgtcacgttgtgagggttgccgccgaaatggccgatgtacctccggacccatttcaagacatattgctggtctaataggcccgggtttagatctgaggtcgacgagtctttgattgccttgccgggtagaaacccgaaggcattgacgcgatagttggagtagataacgatgtagtcgttaatattgctgacattgaggatcgggaatgaggatggtggcatggtgaatgccgcgctgccttgaatgaaagcaccgccgtaaaatacaaccagcactggtctgctaatatctttggctagatcccatggccgtgagaatagtcccaggtagagacagtcttcggtgccgttaaccgtccgctgggggcacatgtcgaagtcctggtctgtatcatataggtctccggtgatctttagcggtggctgaggcgcacgaaagcggttctcccctgttggtggtgcagcaaatgggattttgcgaaaataggagaggttgtaggtactgtcatattgacccttgaaggatccgtagtcgagggaaactagagggttgtcccatgcagtgctgactgtgaccacgaggccgaggagaagcgtgacaacctcattggagaacctcatcttcggttagagcggttttcgttctagagttattgttctattcatctgccatctactgcgtttagcctgggggccatatatagccttcccgagccatcgcatttgataagaggaatcactttcggcagaggaaaccccgagcttctttgtggctctcgagcaattcggtcgacactctcgggcttggctgcgagagagcagctcattggtgcagttattgttgatgcccggaatgaaatgtggggatttgtgcagtcgttgtcaattcggactcgatcaccccggtagtgagaagaaaaccgtagttagctaacaaatcccgaggacacctaactagttatatttatattcaacaccaggtccacaattagtgtgtcaaaacgcagctgtcaagggagtccccggggaataaagcccaagtaaacattgccccctccagaatccaaccctgaaaatgcatcattgcaagaaatcaaaactccagatccaatttccatgcaatataatgccaattaaaccaagtattatcacaaatgcccattcttctaaaccaaaactccgtcctcgcccgtcttgcctcgtaaattgcacaggggctccaaggctgtacagttaaaacgccatacgaagttctctagtacgacgccgacttgcccgagcatcgcggtgagactcagttgaatcactgatttccctttctggggtgtttgtgtcagacagctcgggggtgggggtaatcccaaaactcacgccgcggtctcggcgacagatacgtgattgtgcgtcgggggacaaaaaacgatggacagtgcggtgatccattactcgatcctcaccatccgggcttttgtccgttgatggccactggtatccgtagagcttggaatgacgttcgcagcgcggacattcacgtcgcgtgaggtatgagtttgactggaggaaccatgtatcacaggtctggcactccacccagcggtcgtacttctgggcaagcaatcgtgatgtcttggtatagtccccagggactcgagcaacctgtgactcggtctcgacggagtccatgatgaatcgccgcttggtgcgaggctttcgctttttaggcttattcacaatggtgccgtgggcgtcatctaatttggtggaatttgataagtctgacaatccttcttcggggtcaatgtccatggagtgggtggtgacgggctgaccttcaggagagacatcgggatgatcctcactgttgagcgctttcgactcagacggttctaatatagtttcttctgtcttgatcttggttcctatgtcgtcctcagttgtagctgacgtcgacgagcggtgaggttgatcggctgtggagtttggagattcgcagtctgtggggatagtagaattagtgctattcgtcccgtttcgatcggcttgggcagccacgcttggttcccctgtgacaaccgaaatgaagggttgtgaattagttggcgatgtcattgcggttcgctctatgatctctttcttcggctcggacacctgggctacagcttccgtcagaagagtagctggaatcagtacagtgtccgggatagggatgtcatctgatccgggcgttggttccgcagtaagttcggaaactgagatcccttctcgcaacttagaaacttgtcgttggaattttgcacgtttgcgcggggtggaagaagccaaggtagaggagctgtcggattcctccacatccgagctgcgtccacgcttcctgctcgcattgctgtcttcactcggtgtatcttcagacacggggctggcctctttgctgtttgtctccgtatcaacatgtgaagaccagccattccgtacagcgatttcgcaagtatgacataggcactcgcagttgtcaacgccaaagtaatcctctccgtaggaaactgtgatctcttccccctcgtgaatgtcgcgcatggctacgacagacatgccctcattgccccttgttgtcaagctgccgttggcatcacagtcatgattggcaaaacgagcaggacccaaaaagaacgacggagctttacggcgactcgacatcacgatgctgaagtctttgcgggtcaagccgagatccaactcttcttcatgggtcatagacacaagcgttccgctcaggtgtttgatctcctcgccctttttaataaacctgcgagcgcagatcgctgcttcatgttgcgtgataatgtatcgattggtcgtagtgacctcgaacggacagtctggaagatacatctgaatatacttgcggaggtgtcggcggaaccactccttctctcgagggctacggaggtttgccacatatttctttaagcccgagatttccaacaacttgcgttcggccgtcgggatgtccttgtcaacaatgacattgtggagaagaatgcgcccaatatcgtcatcgtggattccgcgggcagggctgtatttcgtgcggttcttgcgggtagtggtccagaaataagcctgccagtagcaagtattagtggacagatatctatgttgaattgtaggcaaataacatacgtgatccactagcgcatccgttgcgacatcgtcatagctggccagcttagccaaggtcaagcgctcgcgacgttcagcggcgggcgagccccttcgcgctctctttggaggcatcatggacgtaagaagaagccgaagaccgctaattatgaaagcgggagagaagaggtcggctcatagaatgcagagcggctgcaaaggtaattgggggaacagtggagggcagaggtccgagggatggggtcgaaaaaaggttcgaagcgcaagaaagtaattaaaatgagtgactgacaatcaacaaaacgaacattatcaagtgattgtcaccattgaggctgttccaaggagaaaggactccctcgcggatgttttttaggggtggaacgggagtgccagctgagacttgccgttctctcgacttttactcttccgccttcccccttgacgtgtcgctttttttttttctctgcggtaattggatatgaagtaattgatcaatggagtatttcagtacgggggttgtttcgacttgattttacgcgctcagctcgcatacaacaggatgatccaatccttgcccctgcggtatcatcacaattgcacccaaaataatcttccagatcaagtgatcattgtttttcagtcttgttcatagaatgtattgtatattatccttcgatgggtattgactgtataataccagccaatctgctgaagaattcaatggatccaactatgaacatgggatgctctctttcgtgggctttttaaggaataacccgatggcttctcgagcttaggtttttctctgtgtccctcggagtatataaaagtcaaccttcaaagaagacaaaacaaggactataaagatctgaatgcgggatgttgctgaactataaaagtagttggttgatgtcgtatggattgaattaagaaaatcccacgtagggtgttgcttgaagtcagaatagatactccatatgattactatactaaacagctcagggtacttatgttatgaacaagcggcgcttcttgtgcttgcttacgacattaggacatacccatggctgatatatattggagaatcaaacgacagccttttatgagcacaagctcaaattagtctgatatttgcaaaaaatgaatagttgcgcgattccattctaattccattcccaggaaatccaactcgaagtcctaataaccaactactccgtagtatattgtataaaagcccggataaacctactccccggcgaaacctccctccggcccgcgagaacaaattgcggacaagcacttatctccagaccgagtaccaaaacacaatgattcaattaaaggtacgcatgcgatgctccttagtggctcaaacgatactaacaccagctccgccagacactattaagttgcatcgacaattccggcgcctcgatcgtcgagtgcgtgaacgtcctgaagaagaagcggcccgcgacaatcggtcagtctccatggcactcagatctagcaacacagcaagaagggatctgggaattaaagctgacattgtgattggttatctaggtgaccggatagtcgtcgtcgttcagaagcagcgatctgcaggctccgaagccaccaccgctgccgcgctcgccaataaggtccgccgaggtgatattcgtcatgccgttgttgttcgcgtgaagaaggaattgcagcggcctgatgggtcccttgtccggtttggtgataatgcttgtgtactggtcaacaagtccggagatcccattgggacgagactgaacggtaagtgcccatcggggagtctcaagataacggctgtctccaggttttcgatactgatatctctacaggtgtggtgggacaagagctacggaagaagcagtggtccaagatcttgtcattggcgccgatccatgtttagtattttcaagtttctacatttgttggaaagcgctctttgtttctttgattgtacttcaatctgtatgtattcctagttgatggcatcagtttcaccccctgttcctaaatatccacgaattttcatcctgttcctgctccaaaatgttcgccgaactcctatgatatcgccaaaaaaaaaacgacaaaaacaaaatctcaagggtatctcggaaatggagactgcattacagaaatgcaaagatcacatgtagacttgtccgcacgcacaacatacgtagtagagtttctgagtagatagaagcaggagtcagcgcatggtttatatcagagggtcagggatccatcaaaggataacttctcaccattcccgtttcggcggatcgttgttgtgactggaaaaagacggcttcggtttcgccacagcttgggcagagcttgttggcccgtggaagctgcaaatcccagggtgttagcgtatggatgctcaaaaaaaggtacagagctggggtagatgcccgaggcttgatttcagagggctccaggctgtcacccacaggcggtgcatcctcaaggagatcctcgtccggggcggaaccgcagatcgaacaagcataatatcaccgcatagggtaaaaaaaccaggaggacgaaccgtggggtcagatgtcacgtcctgggtgacaccggcagtgtcaccgacttggctatggagatggttttggtagacacagtgcgaggaggcaggctcgccgacatggcaggtacggcacgtgaacatcaatcggttgttgacgcgatcttccttggggtagagcaggttggagctgttgaaaagtcagtaagatgtcctcgaatgtgtaaaggttcccatagaaatgactttgagttgaggacttgtggataggcttaccattcacggcagaacttgaaatggattcgatccgacggcttagtctcgccaccagccgtggaagaagggctggcagacatgctgcgcaggtggatcgcaaaatgctagacgtgctgtattgagggtcgagacgcagagtggtcttagatgtgggaatgaggaaaggaagaaatgaaatcacgtggaaatcacgtgttttgtggatggtgaggtgtgaattcgcctgccccgtagttaactaactactccgtaactaatacagagtactccgtagctaattccgtgtatatgactcacctcaacctagcgcattgtcggccttccaaggttggaataaaagagtcaacaatgaacctaccaattacatcgctttgtctattaacaggcccaggcatgacaggattgatatcgaattacgtataaataagcaatatactgacgtacaggtattaggacctacattgtagctcgtctttattattgcgagctcccctataactacgtaatgtattattgatgtagatagttgtcatagatggtgatcggtcaaactgggaagcgggagagctaaagcttggacatgtttgtgtggtttgcaactgttcaccccgcagtttccgttcacttataactgactatatcgttttatcgtttacactaaatccgttggagtgttattgatctgtacattattatttactcagaaaattatcagaatcttttagatccgattgcaaaatggtaggatcagttcatccctttgaaagtttgcatagctgactcttcgacctaggccgacacaggtcttcctaccggttgggaagttcgccattccaactctaagaatctcccatactacttcaacccttccacaaaagagtctcgctgggaaccacctgcggaaactgataccgataagctgaaagtctatatggcgcaaaaccacaccccggctgctcgctctgatccctctggcgagggtgagggcaagatccgctgcagccatttgctcgtcaagcatcgcgatagccgccgtcccagcagctggagggaggctgatattactcgcacaaaggaggaggcgattgaaattcttaagggtcacgagcagcgcattcagtctggagaaatcactcttggtgacctggcagtcgctgagtccgactgcagcagtgcccggaagaagggtgatttgtgagtttcttaattgacctatgtgcaggtgtcttgctaactccttaaaggggtttctttggccgcggcgagatgcagaaggagtttgaagatgccgcttttggcctacagcctggcgaagtcagcagcatcattgagacagcatccggggttcaccttattgaacggtaggttcacccacgggagtgaagtgaaaatggctaataaaggttctcggtctccagtgtccaataatcgcatgctcccgcctatgtcttggtcaattccatagcgaaaattccgatcgcatcaatgcgttgcaaaccctggtctcacttggaataatcttcataagaaataaaagtacaatgaatgaaatgccatctttgttctcttctgacttatgagtgtcttgtgtcctgtctcgggtaggaccaatcaagtagcagaacccgcgacagccttttattccagaaagatgccaatgtatcgttttgaagatgatgtctccaaatgcccagaatttgtgaaagaagatctgtatcacaacagggctatgaagtttgtcgtttctttggatccaagaaacagagtgaaactcgaaaatgtgcctgatatcatacctaatccctaagtctaaagtagactctgccttaggctaacaatggcacttttaggcttagtagctatgatcaacggaaggttccatggttggaaagggaagttgagaattaaaataagctgtataccgtcgatgtcagaataagatgtcaaaggtcattgagcgcaagcaaaacactgctcttacagacgagacatctcccagtttcatctacttttcttccaccatatttcctgtcactctttccttcttccttctcacccacaatctctctttaccacttccccccaacaatcttttctcatacagccaccaactatgagcaaccccactctcaaactccgccagaagcggtccatgatgcgccttcttaatgaaggccgctcgattctcgagtataagttcgacccaagcgccttcgtcgtcccccggtggattttagtgccccacgaggtgcgcaatgccatggtcgccctccagtacaaagctatggtagccgtatatggcatgaagagcctcatggtcacccgcgaccaccgttacttcaagttatgccccaaaagcacaggccccattatctaccagctccatcaatcctccatgcatcgtctcctggaatggaaggaggattggagtttcgccaacccgacccttgcagccgctgccaaaatccctcgtgatgtcctgcagttctgcgttgactcaatcgcctacggaaagtttacctgtgattacaccaacaagattgacggttttatgtctggtgctttccagagttggcgccagcttcgcatagagattgggcatctggccttccgtctcatgagccataaaccgcacgagtacaataagtggcttgtctggtgggagggcaagtttgctgatgacatgtggagatgggaggtttgcctcgagggcttgattctgcccacctgggaggagatcatcgatgatgtctacctcatgatcaacgatcgagttgagaatgcccaggatctggccaacacattctacgtcagcaccccgggactcgcttcgaccgggctctgatcacctgggctttgactttctgcaatgatgattaatgaatatctcaacaattacgacaaatattggtctgggtcggcgctagtatggagcggcctgctgtgaatgagggcactagaaataaccgggagttttgatttgattttttttccttcttgaaatacaacaaactacagaaaatgtatcctacgatggattgtgacaactaagggcaaatgcaccatggtggacttggctctgcaacacacttctttcctgactttctgttacttgagattattacaagaagctactcaaataataagcacccaattatctgatataattgctcaatgaaagaaagtaaaacatttgatttgcctgtcaatggtcacgtgtgcgttcgaaccctatcaatagtagcagccctatgggggaacaaagtaagtaggtgccttgttattgttcgttttctgcaaaagcaataagacaaataaactagacaagggaaggccaaccaaaaagaagataaacccggagtcgaaccggaacagtccaggtagtggatcttcggcacttccctcgaagtgcacatgcaaatcatgttaccagtaactgttgagtcctcagtctgagctttatattccctttctctctcaattttcaaagtttatttgtgtacacacagcactggctaaagaaacccttggaaggaaaggacagagagagcgaccaagtccaagcccacagaaacacatggtctttgtgcaatttgtgatggtactgattcttttctttcttgtgaagagtacctcgatgaaggaattcccgacaaggaagatttcagttccggaaacgaagaaggatgatctattgtgggcctctcctttaggtctaaacgcctgaccaaaagctcggaggaccgatcattgctgttttatggcttagtgcaggagaggagcactacccaacaggacaatacgagatatatgaggggcggaccggaagatattgtcaaacatgttattatgttatagactgggccagtttctaagaagtattttgttctagtgaaattcacttattatttaggggtcattccagcgaacagcgtcacattattgcgtagatgggaacaggatgaagtggtgttgacccatgaaaaagagcagccgcctgaggatatctaaatcaaccaggaggaatggagatataggccacaattgagatgttgtaacctttaacggcttagatctagctgaggacaacctgaggttcagggtttaaaattcgaacagtggctcgtctcacgagccttgtgaattaatgcgtaataacatactccgtcaatgtgaaaaactacatcccccgacaacatgcagagtagacagctcacagactcgtgttcaatcgttccaaacgtgaggtaatcgcgtcaataacagcggatcttgaagaacgttagtcattgattcattaataggagaataagagaggcaactcactctcgttcgaccatcctcatcgcatctgcaaccttagcccgttgcagtcgttggggcaccttaggcgggcccccaggagaggacggggttccaagttccggagagggcaatttgcccgcgacagacttggtctgggccataagatccagagcaagtcgtttaacctagatgaaatgtgagttttgctatggcgaatgcaagaaagataaaacttacagtctccaaccgcgagatcaatggctgatcctcctcttgctcttcgccttgctgtaaggatgcagacaatgtcttcacctcaattatccatgccttctccctctcactcagaggacgacctccagaatttaggaccttcgtgcgtagtgcctcatatcgtcggttcagttcactttgcttgttctgggcggcttgcaatcttttatccagcgcttctccatttcgtactccctccttgcgatgcccatcttccccaatctcactcgtgacacccttgacacgctctgcaacgtctgcaagctgcttcaattggtcctgcatctcgccctgcagccgctcacagcggcggaataaatccgaagcagctcgctcaagagcattggtatgagcagatagcacgcgatgcgcagtggccacaagatccaatgtcgcaggagacaggcgaacttgctccttgagcgtatggcgttgccgatgcgggacatgcttctcgacgaaagaatccagcggagagttggcatagaaaatggcgggaacctgatacggggcccggctcggcgacaaaagaagcgagcctggcgctgaggctctgggctcatacagtgatttgtctagtgccaaggagagagaatcttctggtgtatccattacaactgcataagggttagatggatggtaggtgaggagcaagtagccaatgtcaaagtcatagaaaacaagagacgtggcaagatgttcgttttgcgcggtaatatcggcattcgaaacctgcaaaattctctctcggttggtcacattcccgtcacatagaacctggagacggaaagcggaacctgcagtgtcttcagcttgcaactcagcctccagtctctgtacccaaccggagagagatataaacaccacgttggtggcagtggtgacaaagaatgagtatcgagaatggatatccttggtgaaagtaggccatgaggttgtttcctccccatccttgatcgtatctagtgattcgaccaggaccaattcagtcggctctgaaacaggagtttggaacgcgttctttctagctttaggtagccattgtccttcaacgccatcgagctctagacagatgtgaactcggccattcccactagtaagagagagaactgttgccgaaagcttatcttggtccccagtttccacggctaattcttcttcctcgcccatcatgagatcctcgacgtttagactggcggcaataacaagaagatcacaaagatccaaatcatcgagctcatcgccagtttcgaagcggaaaggcccttgtaatcttggaatagcgctaggattggccgggcgcgtgaacacatctgcgccttgaattgttcgtgatccagaaggcgcatccagaggttcttgttcatcaagctcagaaagccagtcatactgttgccggcaggcaatcagttcctcctccgattcctgggattcctgttctaaagcaccgagtttcggaataatcgctgcagagagggaagggatggtcgtagaaggggcttgccacttaaaaggcaacagaggacaaagcgcatagagatcaccgggtctcatggctacccacagggtcataggcgcccacgcatcttctttctcattcccattgccagcgaaacaggccgacgcaacctccatatcaataacatcagcggagaatcccttgcttttgccaaatccagaaggcgcgaagtcctggtcgcacgaggtcccatcgacaagtttcttcagatcgattgctagagtcggctggtcgaaggaccagtggttattccggtccaactcccagacacgtactgcagcgtcagccgtgacagtaacaatgcagcctcctaaattggtgtgcaaccccagtggatgccatagcgcagagaccaccggagcctcaggaataacatgggttgtcggtcctaactgatatgtcttcagccggatagagtcggagtcggaggacgaaaggtgtgaagaatcgggaagaacggagatatgaacggtgtgttcagtgactatggcaaggaaggcgccattcggagaggggatgatctgtttgatctgtccatacacgggcactgctaagacctgcggaactgttagtcgcattcaatttaagtcggattttgggtggaatagctttgcataccctgtagggaggaacctggctgaggtcaatttgctcttcagcttgactagcatatccctttttctgcttaatctcttgttgccattggtctttgagtcgggcaaggtttgaccaccgtatttcattgtcaacaacagcgaacacctcattgcctctcttggcgatcgttcgtgtagctccatttctcatgggcttggatccagtttgcaggtcctcccctgggctctgggctgaactgctagacaggaactttgcgccaggtgagggccggcacagccaggcaggcgcataactgttgaccttcggcattaaggacgattcgtgaaataaattgtataatcggagggtgttgacagtttcagatcatcctggggcggtcggaaatagcagacgagtagcgtatgtgggaaaaaaaacaaagttgacgaaagcaaagttgttgatgcggagtggaattcttgggtgccaagatctttcgaagagctccgagctgctttgcttccccaactacctgccgtcaaccacacactccaagttcaacctttatctcaattcactatgagtttgctggctgtaaacacggtcgaccgactggatcgaccaagcgcctactacgtcagcaaggtgagtactcgccctggactgactgccctttaccaagctgtgtcgaaaccagtccaaataggctatagaggctgaacaaactgtccacagaacaagcgacgcagatacaatgatcgtgaggaggaggaaccgcagcaacaggagaaacccgatgacaaattgaaaaatgcgacaaccctctacgtgggaaatctgtatgcaagcatgcaataacttagacgcaattgtcttactaaccaacccaagttcgttttataccaccgaggaacagattcatgaactcttcgccaagtgagaatgcgctttcgagtctcttcgaattatgattaacctcgaattctaggtgcggcgagatcaagcgacttgtaatgggcctcgaccgattcaacaaaacaccctgcggcttttgctttgtcgagtattatacccatcaggatgcgctagattgcttgaagtacatcggaggaaccaagctggacgagcggatcattcggacagaccttgaccctggatttgaagaaggacggcaatttgggtatgtggtcttcaccaatggcggctttaagctcgtacttactgactttcgctgcagacgaggcaaatcgggcggtcaagtgcgcgatgaataccgcgaagaatacgatccgggccgtggtggatatggccgcgcctatgatgagcagcgccagcgcgaggaggacgaatacggtgctggaagataggtcgggacataatggaaaaggactggcttggcaaagcaatggcgttacttcatggaagggtgaatccaattagcagaaagaggaaatgtctattcaccgaataccctatttacaactgtcttttttccaccttctaatgctggtgaattattgctttaacttgtctcgtttcagcactgctgcttgaacttcgcgcaaccaccaagtgtggattcttgcgtcacctgtcagctccgggtgaaagctggtgccgaatacattgccctgtcgcactgcaacaatgtcgccacttccccggtctgaattgatatctccaccccccgtggcgggttgagctgccggtctcactaatgttgctagtacctcaacgtgctctgctgttgctgcttgcgccactgagtcccgtgcttctctggacggtgccacgacaacatcttcctgttgaatctcttctttttggatgccctcatgatggggaagaatcttttcgacgataggggctcgaatgaatactgctgggaagggaggcgcgtcctgacccaagaatggcagatccaacaggccttggaagctttctgtctgtcgaccgaagtggtttcggttcactcgcacatcaagaccaccgatcagctcttgccctcctttttttgtcttgttggcagactcggcgagcaaaatgagcccggcgcatgtaccccaagttggtttgcgatccactctacacatacccaacgtattagattgaattcatatgaactaatcaaattcacttactttacaaattcccgcaatggctcgaggagatttgaccttgctgcgaccaaagacatggtggtactctcgcctccgggcaagaccaggccatcgcatgttgccagttcttgtggcgttcgtacttcgatgaagtgccattccgacggcgtcacttgctcagcggcttttttcaaaagctgcacatgctcaaaaaaagcgccctgcagggccagaactccaacagtgatagccattgtctcgaaagataagaatcgaagacctcgaattcttgatattgatgactcgtttggagcacgtgcctttaacttcccggcggggagcttatctccacgtgatatctctgtggcgcatgtcgggatactctcggactttactccaaagtttttggctgggaagttgactggataaccccagtcatgatagtatagaaatcaaatttacctacagaaagactgatcaggtagccctacctggtatatcacactagttccaatgatttttttcctctcttaggtacgccgttgtattatcggcacgtgttgatagataagaactctgataaggcgcttctatttaggtgggatgctgcatcctaggctggtacgagtatacgagaccccatgataacaatgcaatggtagacctcggtgtatctggacgtgtaagtagctactggcccttcaggaattacccactgataaagtgcagaccaaagcggattccaatgagattaaacagaacgacatcttaaagggccagcccacgttggtccgatggtacatcgatgtcagacgttgggatgaaaaatcctttgaccttccttttctccaaactctgaatgagcctgatcaggtagctgtcaagaagtactaccaaacttcggacaaacgcctgtccttggcctcccagctactgaaatattactatgttcaccaagccactggcactccctggagcaaggttacgattcagcgtactcctattcccgaaaatcgtccattctacgactcaagtcttgatttcaacgtcagccaccaggctggtctcactttgttcgcaggcacgcgtgccgcaacagcccactccttaaccggcgaaccacaaggcttgcctcgcgtgggaattgacattgcctgtgttgacgaaccctctcgccgtcgtgctaatcgtccaccgaagactcttgccgacctggcaactttcgtggatgtcttcagtgatgttctctcactccgtgagcttgcgaccatcaagaacccgtacgcgactcttaaattggctcgtgagcttggtctgagtaaaattgacccgagaaaagacaacgaggaagtccatgctgcctacggcattcggctgttctactcaatttgggctctcaaggaggcttacttgaaaatgaccggggacggccttctggcctcttggataaaggatctggaattcacaaatgtcattcccccagaacccgtacagaaacttggatttccaggtcgccctctcactcctacaactctcaatgcgccctcagtcgaaaattggggccggccttactccgatgtcaaaatatccttacgtggcattcctgaccattctgtgcgagttcagctcgtcggcttcgagtccgactacatcgtcgctatagccgcttcaggccccaatattggagccatttcgcagcagatggccgtgaatggcagcgatcatcacctacctgggtatatcacagccctcgaccctgaaattgaacatcagaacgtccgaattccccccaatgcgcttcgcacagtcggcgaccgggacccctggtgcgttggctcggcgattgtagacccctggttgcccatgcaggaggttgatattgacattgatattcggccctgtgccgagggccgctgcgagcatctacggaacccaccgagcttctaagtcccttcttcctgggatatgaaccagtaatcatccctgagttacctgcatgttgcatctcctcatctcatactcctttctgagcgagatttcgcgatgattccccttgagcatatttctgcattgctttgttgtgattagcgaaaatcaaatattcctcccatctttagggacttttgtttcaagtgtaatctgttcttagctagtcgagtgccgcttagatgtttatccctaataagcctctgtgaattttcactctccgatgtgatttagatcgaacccaaagtcaatattcgaagacgaagtatatgttgcacgaaaaaagacgagtaagaagcccaagcctatctatgttctgtggtctaatgtaaaatcaaatatataagtaacaaaagcgagtatctaacagtagccgggtcgtgtcatgcgtttacgctaaggatatatacattttgaattgaaaaggggggagaggcgaatcaagagagaagatgatgttagaaggcaatgccgatatctagatcattgttgttctcatgagcagtgtcgggtagtgtcggataggttccacgtctgaggccctcaaattctgtttgttgggtcgaactggagtaggtaccgaagaattgggcaggattatactgtagtgtatgaagggcggatttcttcttcgttaattgtggactctgcgtttgctctctgctgttgtgaactttgaattttgcactcaaaccaggagagacagatggcaaatgccgagcacggagctatgtgacgaatcacaattttgtttgccacttagatttcaatggcgctggagacgccgttggtgcgagaaacatcgacttcgttcttctgtacatgagacatttcttcaagagttttgagcattgaatcccgcgtcgactgggtcaagctatcgacatcgctcgatgtcaaatcctgagtcaaaatgggaggtaaaactgttccaaaattgttagccatgttctatatgacatatattggcaacttttaataacacccacccttaattttgatagtcccagcgttgaatcgccaggcacgaggcgacagaacgtgcgaatagttctctgtcacaatcggcacaattggcgcaccggccttgacagcgaggtggaaagcacctttcttaaaaggtaggagagtaggctcgtcggagtaactccgggtgccctcagcgaaaatgaaaacgctctggcggtgattgcgcatctcggcggcggcaccatcgaaagccttgagggctgtctcccggttggcacggtcaatgaacacagtccgggacagagacatgaaccagcccaggaaaggaatattccgcagtgacttcttggcagtcacactgcagtatggcgggaagacactgccaagcatcaacacgtcaagctcagtctggtggttaccaatgaaaacggccggacgtgtggagaggtattcttcgccttcgacaacctcgaacttaacgccagttgtgaaccgcatcagccacttaaagctacggcctgctgcccactgcgaaacacggccgtatccaactagccgcagacagatcgagacgagcacaccgtacgcggcactgacgaggagacagccatacgaggcgagacaccgggcgacaaaagcggcgcgaggcactttttgaccgagtgcaaagagggagacggtcactaccacgaaagaggtaacacctgaaacaatataagatccgaaagacatgttgacggttgttgggcgatcaagaagagctaggtaaatgcggttagagggtgaaaattatacttcatgagaggggacgtaccttgttcactagtatatggacaacagccagcccacgacttgaatacgaggatggaatcagcgaagaaaagaggaataacagatcaaatccaagattgagccatgcatggcttgtggagaagggcaaatggtagagagttgaatcgtttttctgccccgatgccgactcaccgcctggtatgtgtatatgacggtgtcaccagggcacttgcgggggtatttacaccagaatcaaagtatattttaaggattcagccaataatgagaatctctatcctcaaaaaataatagaattatgcattcaccatcctcatgatgcatgcccagggaaaaccgtgaaactaatgtacagaacaccatcatatgccagatgtctaaacctggaaaagaaaactccacagtgatgccgtgcaaagaggccctcaaacgccgagttcataagagagggcccccgtgggaacccaatagaaagacctgagacattacgtctacgctatgtcctcatcctccatatcgtcgtcgtctaacgactccattgcatccttgatgtattgtgcagcctgtgtgagatcataatcagaaagaacttaaaaaagagaggggaatctaaaaaaaaatactctaagacgtacctttgggtccaagttcaaggctgccgtgaaatgcttgatagcattggccttgtcgtggagcattttgtacagctttccaagaaggtagtgcacgtttgcctcgtccggcgccatgtccttgaggacctttaattctgccaaagcaaacttgtactcgcgcagcttcataagtacgcgcgccttgcggaacttggctaataccgagttgggggctagcgaggaggctcgtccgtagtggaccagggcatcttggggattgttcattttctccagtaccagaccaatgcagcaaatgagcaccgcgtttgtcgggttgatgctggctgcattgcggaagtgctgctcagcgaagtcaagcttgcccatcttgtcatacaccgttcccagtccgtaccaagcattgtaatgtcgattgtccgcgttgatgccgtggcgataggcctccaatgccttgtcgtattcttcgttggcgacatattcatgtccctgtagcgtgaaagcatatgcaaattcaggatcgagcatagtcgcacgcttgaagcacttgagtgcttgatcatgatcccgttggtgagaaaaagagttgccaatagcacaccacgcctgaggggataggcgatcagcttcgagtagctgatgcgccaagtaagccagttctacatcacttttcagatgccataagacggtcgagtagatctccatatcctcgatgcgggagggcgctaatttttgaaccctagaaaagtacttcgcggcttctgtgtagcttgcttgttcgaaataggtccgtccaagttgagacaaaacccaaggtgtttcgcgctggccttgcgagagagaattgaaagagctgatggcatccgcgcacctgtaacggctcaatgagaaatatccagacgcaagtttattgaaaagacccaaaagccaatccaaggcttcaagctctttagttttttcggcatttttgggtaatggggggacgagatgatgcgattgagacaagccagtccgattatctttaccatcattgtcgggtgtctcaatgggttttcgattgccactcacgacacggccgacagtgggcacacctcctactcgtccttttgtagggcctcctctcaacttcttcatctcgcgaccgtctctgccagtaagcgtgctgtttgaaagcttgctgcttgtaggtttgatctggttgaagaggcgaacgcttcggcgctggggagcacctggttcactcggttgtgatgagggaagtggatgggccacttgcccagagactgtgcgcttgcggtccccgaatctcgatacaagagaggaatctcgttctaccggagcagctggctgagtctctggttcggtccgcgtcttgtggcgaggtctgattcccgttggacgcattcgcggcggaggttgcccggtatggtcaaggctcatagtttggattgtccgtgtctttcgggcaggggccaagggtgcttcccatccagcttctgggtctgtgacgccattcgcaatgcggaagtcatcagagccactgctctgtgcgcctggggtctccattccgtcgtggaaaaccggctgtgccatagcagcaaaattaacagagctcccatttaacttttcccaaagagcagagcttccaaatgtggtgtcagtttcgccacgggaggcagagaccataaaagggtcggattcagggttatttggaggctgcattgggaaattcccttcttcgtaagccacgtggtcctgcacagtagttatttcctccggcgatgaagatattattgcaagaagttctgggctaagttgaaagatattcgggacacgaatattgacacctgatattgcattagaaaaaatcgccttgagagaagaagttaaatcaatacctgtttcgcaaagccctaggaaagcatcccacatgaaggggttcagtttcagtgcctccacgtaacagtcaactgcttttgtcaaatctttatgtgcgtgccaaagtttcccttgcaaagaatacacagctgcagcatcaggcaggtgctgtcgctgagtctcactatgcttgtctacaatgtggttagcaagtgagcttggaattgaaggaaaagtttgctggcacttactccagtggttcttagtgacccagaggggtttgctacgctccagagccgtaacaccatccaagtatttccccaagtctaagcaggtctgagcaaagacatatgcacaaccagcatgcagaccacgtgagcccgaaggctggctgcattcgaacgccgccttcacttctccattgtgtaggtggcaaagggcgagcagatattgggcctcaaatgatcgtggttcatatgcgaggaggcgtgaagcgaggaagagcgcattgcggattaggttattgtcgagctggtaatagatgaggtgccttagctggctggcaacatgcccggtggacaaggccatagtgaggggtcagcaacacggtatgcgatagcacaaggcaaggcggaaattctttagtgattattggaagtggagataataatgcgatgcgcagagtcagttccttagcgttactgtagcatcaatgtccgacgcctttgtaatgtcctccaagacgcggggaggaaacaaagacgcgatcgagtgggttgttgcagcacgagcgaatggtcccatcaacagccacgagacatggacagcagcaagtccgatgtcttggtttgaattcgtctagatgcaggagctatcgagtgttctcggtgtggaacaatgaggaatgtaaacccaagccggaaatggtaagcggatgaagaatagaaagaagtgaagagtgagtcctctggttacgtcatctgcggacgcaggatgagtctctcagagtgccaggaacatttccaaataagcggaggactgcaagatgtgctcaaataggattcgttctttctgttattctggtctgaggcggcctttgtcatttctgccgttcttgtcgggcggtgggggtagtggagggcaacaatcacccaatgtgctatagctgtcatatgcaggtcccctctcttcttcttccttctccgcccagtctcgaattccgatcatctgcttgccacttgagaggggaaaagcctggtcaattcatctagggcatctgttctagaaaagatcattgcagatcgcttggtgatcgcattcaaccatggctcaggtatgtagtgaggacgcctgcttgctgcgactaaacctcggattagctccgatcgttgggttgaaaaattctgaccgtatcacagaaagctaccaaatctctagcggctcgcaatggtgctgtcctcagccgtacgcacatcatctctgctgcattgcacctgctcttcctcctactgcactttgccttccagcggccgcgttcactgaagccatacttcttcctggccgttccgacccttgcaattgaatattatttggaccgaatgggccggcctcgttataatgaagatggttccctgcgttccgccggcgaagatctcaacgccaccggtctgacggagtatatgtgggatgtactttactggacccagggatgcattgttactgtttgcctcttcaatgacagggcctggtggttgtggactgtgatcccattatactccgtatacgccgcctacaccacgataatgggtgtgaagaagggatttgctggaatgggtggtggtgatgcgggtcaagagaccgatgccccaaagagcaagacgcagttgaagaaagaaaagagaggctcgaccatgaagtataggtgatcagagagtggaggatatgtacaaaatgagttgatgtagaatgggaactccagtcatttccatctttcctagttggatgccatcttgaccgtcattttcattctatatatttatatattggaacagaggaatttcctactacccccctcaacctacgagcttggctctgacgctgtagattttatataatatcatgatttcacttttctctccacataaacataacacgtgtgcattgatttctgaggcaagattaatcgaatccgtttatatgtgtagattcttgccattacctatgtaatcatccttattagcccgtttgataggagggatgcacaccgtgggtgatagctacatacacatcgaggtcgggatacccaaccgctcagaaattacacaaaataattccataactacatatttagtttcaaaaaagtcattcgttatgtactgaacatatctcacattaaacaagcctcgtatttcaaccaggaagtgagtagagaggaaaattgagatagagcgggaaaaagaaagcaagtctgtgcatgttgcaaatcatgagcatatggccatcgtgtcaaattatacggggaataatgcgtcgtgagccgcgcatggcattcccaagacatgggtttctttcggaacaaaatgattaagtccggatcaaaagaagaaaaagaaagaaaaagttgagagacgctgaaaaaaaccgatcaaagttcatctttgactgaaactgcggaactcttgatgctgcttgttgtatctttaaggtgggctgtggcggtctcgactgcctcgaagataacgttgctagccggtagattggcggctagatcagccagctgagacatggcgtcctttttggctctagcgagacgaatagctgcactctccactgcgctgggttccttgccgtagatagcagcgctggctgtagattgaatattctcaatggcatccttagcgacatcgaggtaactcgattccttgccgtaaactgcgctaatgatctgagccgatgctgttgagtacgcatcagctgcggcatcagtggctttctcgtaggaacccttgggggttccgtagataccaacgctggcggtttcgacagcagcacggagttggttattcgcgtgttgtatgatgtcctctacgctcggggcttctgaaataacagaagcagcgacggaggacgcagatccataagcctcattaacgtagctagaggcagacgagaaagcgacagccgggtacggcgtctcatatgcggctctcagtttgctcagcacactctccgtatatgaaggttgcttgcccgcaatcagttcagagacaagcccttggactgcctcaaactgcggacgcccattattcaccacttgctgcagaaacggcgttggcgcaccataaatctgctcactggctttcgagatgaggctttcccatttttcaggtacttggctataaagggactctacagggcccgtggaggttccgtggatgacagagctagcggaaatggaagccacagagagagacgaagaagccgcagagagggcagcattgtatcgggatgaagcatcttcaacaatactttgtgctttgccgccatctgcggaagacatgaccgagcttgcagatgcgacgacagcggcaaggctggcagaaactaacgaggacacatgctcgtattgagatcctgcttcctcaatgatccccttagagcttccggctggtgtgggggttggagaaccatagaccgcctcggatgccgtagagacaaagacagagtagtggtcatgggccaacccgactgcctcgtagtagcgacgctgcgcatcaaggacgaatggctcgagaccgccctgaggaatactggctgttgtcgctggtggctgcactcgagctaattgttcagatgctaagctgagtccatggcttagccgggaagacgcaatggatgagatatgggccagaggtccgacgttggatggtgtcggggtagcacgaacactgcggagcttcgattccagctcatctgtggcgtattttagagacccggaataggccgactctatggaagcgagaatctggacatgaacaggagcgctagattcggctattcggctaagaacttgagacttcgcgatctcatagagtactttagcctgatgtgtggaatcagcaaatgttgagctggctccgtccatcaaagattggacaaccggtgttggggtgccgtagatgacggacgacgcactgtggcagaaactcgcattagcgataattcgatttttgtgcagttttgaaacacgctgaatatgctatactacttacgcggctacagcatcgctatatttctcagagccgtcgctgtaaaccttttcgacagggctgagaggggtgccatggataacggtagaggcggcggaccaagcaacagagtactgttcactggccaatgatgctaccttctcaccgactccgttggtcgtcgatgcaccatagacagcttcgctaacagcatcgctggccccggcgtaggtatcgccaaccttacttgccagactgtcctggacattgtggctctcatcatctaggataggcgcttgatgcaaatttgcatctgcagccgcaacaccaaaggcgggtcttgcggagggctggttttccaccacaatatcatcgtccataacagactcgttaacgccatcaaagtccgcttcagcattgacagccgcggaaggctcatcggtaaagggggtttcctcgtaagcgtcatccgatattggtgttgccacctcttcggaagactcatcgttaccgaaatccatcttggcagcttcttcgtcagattcctcggtctcttcttgggccttgggccttgttggcggggcttcggtgcgagtttcaaaatgatcgcttacttcacgagccgcgatcttccagatcccaacatcctttaaccgaacaagttccctggcagcttgttcggcttcatgcatgccttgatctaagatatcactcgccacggctctggcgtcagatacggatttgtggttcatgccgacatttcggatgtcgttacgccattcctcgagttgggctttgagggcatggtactttgcccaatccttgtatgtgacaccatccatccacgcccagcgcatgccaatttcttgtaagcctagattgcgaatgctgtcgagaacatctattgtcgaattgacagcagcagtgactcggcgaacgagttcgtcctcgaacgagatagaccactctcggagtgcatgggcgcgatctctcacagagatagcagaagttcggatttcccgaatcagcaagtcgctagtagacttctcgatctccggggcgtccacctctggcattgaacccgcaagttcattgatgcgttgtttcatggaggaaatctgctcggctgaaaccgactgaagagcggtagaaaggctctggccatgggtgttcgcgctgcttgcaaccagggcggacacgatctccccaatacgtccctcaaggtcttcaatacctttatcggccgcgagagaaaatctttcctgccaccgccaaaggtccgaatctatctcctcgcggacttgctgggcttgctcggtaggagttagagtgggttggacggaagcctggggcgtgaaggttgaagtcatagtggtcgaagtgtggatttgttcttgtgacttggtagtcaaagagctaacgggctggactgttgagctactaaattttatggtcagcatgctatggactggataaaccaaggaacttttatgtacctatccacgtcctctatgacagcgcgaagtcgcttgccctccctgtagcttgccaatcgctgcccaatcttgacgagctggggctccacttgttcagagtaaagaccagtaacgtgaggccatagtgagctgttagcaaagtagatcgcggatgaccaggtatactgcgccccgggcatgacatgggttgccaaaataccctggccggtggagtaaactttcccgatgaaaggttttgaacgcgcgtagaaagggaccagttggccctgatagacattgagcacaacggtgctggcccattggcagtatggagagacaacatcaacgctttgctggacgtggggatcaatcttggctaagtaaacctggtgaaccttattttgagcagtccgtagtcttggtgagacttgatgttcccattgctcaatcccatatgcctgagcttgcttcaatgtcggcgctccatacttctcatatcctgatttggtaaattttgatgcaggggtataaactcgctgattaaaaactttcacgtaaggccgggcttgatcaacgtaaggcgccgcataaatatcataatatggcgtcacataaggttccacgtgtgaacgagcaatcaggtagggcttgcagactcgaggtgatgtctctgtgaggtcttcgagatgggttgggcacctgaaaaatggcgtcaagagtgcgtaccagatacatagcctgagaagtgaagatgttaaaaggggcttttcgctgtatacaagtatggcgatgctatcactcacctcacgataagtccgattgtccatcggacgaagccctttctccgtggcttttcaagatccattcggccctttgctttggtcgtgacatccgtcacttcattccctttcactaccatcgcaactgaggctgaccttgtcgaggccacgcgatcccctcgtgatattcgaggtcggccgaattcgcggaggacttcccttctacacacttagatcgagtcggctcagtatgaaattatcgctgcatcgggaataagctcacagcccagttgaatataaggcttttcgagattgtgctcgagactgcgtgaatcaaagcaaattagctgctgtaggcagaatgttcgcgtcggtcttggcgttagcaactttcacgggaggctaggtcaatttcaagaagaatagttggttacgaggaacgaaaggtcgaacgaatgggttttaggtctgatgagaaagaaaacgcagggacaactttattacaatatgaggacaaggcgatcgcatatgacacaataaatcagggatttgtttttagagctcagtgaggtcatcggtggctacacgtactgcatatacagcaatacccagctactatcgccttgacaagcaggtattgtcatatttcatgtattgccaaaacacaccgccgagtcggcgaattggaccccgggcagctacctggacaggctgaattgctttgttacaatcaagcaccaatgatctacagattacggttgtgaggtacgatactcctatcatataattgtcaatcttggcctcactaatcattctattcagttcaaatcggattgcccaccaacacaagccttccgtatgttcacaacctttgccattcccgcttgactaggaacatggtgaatatctgatcaaccaccaccgtcaaatcggcgagattcacgaattatggagcccgcagagaaccaattccgcgataatgcggataataccgcattccccgatctaatgaacgacccggcttatgacgaaagggaaaagggatttgacgacttagatacctgtcggatatgtcatggcgaggcgacagaagaggaaccgttgttttacccgtgcaagtgcagcggtagtattaaattcgtccaccaaatttgtctcgttgaatggttgtcccactcacagaagaaacactgcgagctctgcaaaacgcccttccgatttaccaaactatacgacccaaacatgccgcagagccttccagcacctctgttcgcgaagcaagccctgatacaatgcttccggactctagtgacttggttgagatttgttctcgtagcatttgtctggctaggatggctgccgtggtcgatgcgcgcaatctggagggcattattttggcttgctgatggacggtggtctgccaatgaaaacgttcggaaccaggccgcacaaaccgctcaaaatggtctcgggcaactgttctcaaatggcagtgcagtaaatactgcagtaaatactgcggtaactgactcgattacttcgtcaatttctaatgctgtcgtctcatctactactgctgtaccatctgcacgatcgtcaattctcaatttcgctgccggagagccgctcatgcttaccctcatcaaaaaagtgatacccacacttttcatgccagcgtttacctcgactgtcgggcaaggcaacggacaggacaacgtcacggttagctcaatcaaacctcggtatccgtcatggctttcggacgtgaagttcttgaactcgttgacaccgtacccgacaatcaacaacatgatcatggatacattagaaggacagctcatcacccttcttgtggtggttgcgtttattctcctcttcctgattcgagaatgggttgttcaacagcaacccatggtaaatattgcagaaggagaacgtgaggctgctcttcagttaattgcaaatgccaacaatcggataaatgatcgattcaatgaagaaggtggtattcgacaacctgaacccattcccgctcgcgcggaaaatgagatcaacaatgaacacgctcaagcccatgagttggacaatgacatccttcctcattttgttccccactccccagctctgtcctcgaatgattccgaatacggtccccctgagtttgaagcggagctacgagactacaatgggaatgacctggaatacgaaacaggaggccctcctcctacggctcgggctctagctttccgggacctagtggcccgtactcatggcaaccatgaagagatgctgcgcattctccgcgaagaggctcatggggatgatctggattggattgtgaatgcgatcactggagcgaccgtagaccaagattcatcagcagggccttctattcgtccccatgatctcgacaatccagaagtctcggacgatgtcgatggtgttaatcttgaagttggagatggagaggatcacccgcctcatgcggacgccggaccttatgcccagaacgtgaatcacgggccgccaactcgagacaatgccattcctgtcaatatacaaatggaccgtcggcctccattgggcatcactgagcgggtgttcgaatggttttggggagatatcacacctgtagcccgtgatacagaagagccagtccccgaagatgacgaacatattgttcaggatccagccttggaagacccattcgtgccctttcccaggatggaagagaggccagcagccgatgctgctgccgcgaatgccgctgccgtcgcggatgccgagctggaccctaacgatatcgatgcaatcgaaggggacgatttcgaagggatcatggacctcattggcatgcatggtcccattttcgggcttttccagaacggcgtcttctgtgcccttctgattgcgttcacagtagccatcggtatctggctcccgtatctatggggtaaaattgctcttgtgttattggccaatcctctcgaactcgtcatcggtgttcctatcaccgcggttgaagtcgtcacggacattgctcttgatactcttattggtgtcgtgggatatctcatgtactggttcagccttttcttcaaaattgtactgagccctgtcggtgctcttttgcctattggagaatggattcctcgggacaactcagtcactagtgcatcgctttccctcatcgacgcaagcagtcaccgcttgaacaaagtgatcaaagcattcctggtcttccacgagtctgatattccaatgttctcagtgctctcgcaccaggcgcttaaattacatcaggctcgcctcggtgctgtgttccaatcgggctttgccgctgtcaagttcatcgtacatgacttccctcttcggcttgcgacgctcggtgttccccgtgccctgtctttcgacattgaccttgcccatttcaagaatcttattggccaagcccaacaacaactcaccaccttcgctaaatcatcgcttttctcgatgcctggaacaagatttatgaacgcaagtgcagcgaaagcagcctctgccacagtgccggtcgattatgacctagcagtctgggattccaaggatcgtgttattgctatcttcatgggctatttgctagcattcatgatagggcttctctatctacgaatcacagggctgctctctggtgctgatcggggacaaaggatcgagggcctgcttgctgaggtcctgatacaagccggaggagttatgaaagtcatcctcatcatcgggattgagatgattgtcttccctttgtattgtggcagtcttcttgatcttgctttacttccgatcttctctaatgctacagtggcctctcgtattgcttttactgctgcatctccgctcacttcgcttttcgtgcactggtttgttggcacttgttacatgttccactttgccctatttgtttccatgtgcagaaagattttgagaagcggtgtgctttgtaagtgcctgttatctacgtgccagaccttgattggattgctaacggttcgactctagatttcattcgtgaccctgatgatccaactttccacccaatacgcgatgttctcgaacgcaccatcactacccagctccgtaagatcggtttcagtgcccttgtatacggtgcgctagtgatcctttgtctaggaggtgtcgtatggggcttgcactttgctctcgatggtgttctcccgattcattggtcggccagtgcgccgatgctcgagttcccggttgacctcctgttctacaacttcgtgttgcctgtagttattcaatctttcaaaccctcagatggtttgcatgatttatatgactggtggttccacaagtgtgctcatttcttgcgtctcagcaactttttctttcctgaaagacacctggaggaagaaggctaccacgttcggaagacatggtggggtattctctctagaagcgagggtgactgggaacacccggtcgttggagatgaccagcaggctgcagctgagcgggaaaatcgtgacgtctacttcctgcgcgatggtcgatacgtgcgcgcccctggctccgatcaggtccgcattcccaaaggcaaccacgttttccttgaggtcactgaggacaatgaacgtgttgatgggaagcccgatactgccgatggactacatggccgatctagcaacatgttcaccaaagtatacatccctccctccttccggagtcggattgctgcctttattcttctaatctggctctttgctgcaaccactggggtaggcatcactattcttcccttggtcattggtcggaagatcattgtgtcctactcctctactccggctccagtgaacgacgtctacgctttttcaagtggtctttgtgtggtcggtgcacttgcctacctggcgtactactctagcaccgcactaaactttgtgcgagagaattcaggcgcataccttcgttcccctcgccaagcagcccaaaccagtctaggcctcgtgatgcatactgctcgacttatctacatgacccaagttgccattatcctcctaccatcactcttcgcgctgctcactgaactatacattctcattccagcgcacaccctctttggtgatggagagtcacatgttgtccatgtggttcaggactgggcgctcggggtgttgtatgttcagatggctatcaagttgactttctggcagccccaatccagggtggcagctgcggtcaacagtgtcttccaaaatggttggctgaagcccaatgcgagccttgccactcgtgcccttgttcttccaatcgttctcttcactgcagcagcggtcactttgcccttgtcatttgggttcattgtgcgctggacaattttctattcccacgtcggagtgcagcctaatatctaccgttattcttatcctactacactcttgattgtgctctctttatggatggcacatctactgctgagacgagtggcggtctggcgcagcaatattcgcgacgaagtctacctcattggagagagactgcataacttcagtgagaaacgaggacgtgtgacggtgtgtcgcgggtgatgacaggatgacgaaatggatggatgtttgataattttggcctggtattccagcgactctcttaccttttagcttcattggatgtacatttaactcgaacgactagaatccaagtattagttacttaggacctttcatcctgcccgctcgccgggattgtgcctgaggcatgatttttatatacgtaacgggtattggtaataccgtaatatcaatattcattacctgctgcctaccccgtggccccactattggccctctcttgtgaccgctcattggttaggcaacaggattccctcgatgcgccgttgtgtggttatcggccttcatcgccatcctcaaggcacccattgaaactgctcttgcaagtctttatcgattcattcctcctgtccgatggattgtttgccttttagcgactctcactatgtgttcttgaacgttccctctccagtgccttgtctctaatgctcgatactgtatctgtcattcttatcgattccctccgtaatcgccaagatgtcagtcctccggcatggaggaggaggcggctttctccagcggcgcctcacgaaactatataccgatacgaaaacatcctgcgagagtgttacgacagcctccaaagccctcgatgatcctgagctcgtcgccctccacgggagtttccagaaacagagggatcgcttgctagcatggggtctagattggagcgacgcaagcgccgcgcagcccaacgacatcgatgaatcgttgactgctgcaggtttcagcgatgtcgttgagagtgtcatgtcatcgatccaagaactactcaacgatgccgagcaagtacagcatttggatgcgcccatgcttccctcgaaggaacggaaggtcgatataccatcgaaggatacccttggtagcagacccgtcaaaacgcaatggacagaagaagatataactcgctcaaacaagatcttgaatgaactcactggctgtattgataccctttatgatctctcgcgctcccggcggacaatggcttccagcatgtcatccagcaggaacagcgcgcgccgcccacgacccaatcccacctcaacttatgattcatctcatggctcattctctgattccaaggagaaagcacaaagcccgaagcaaatgttcgatccattcacctattcgcccacgaccgcgcaccgtgactctcttaatcctttcctgcccctgaaccatcttctcattgatcgctcagctctgcaactatacggtgcggcccacgataatagccctcctccgtatgaacctgttgcggcatcttccaattcgcgtgccattggacgcctgaagtcatcggcatcgcatcttctcacctccacaaaagagtcccatgtctccgtgcttgtcgagtttatgcctatattggcggagtcaaaaatggataacaaaagtgctcgattggaaaagctccaaaagtctattgagcaattgctacagaacgccaggatctcacacttagggttgatgcgatttttgggctactgcattgataactcgaattctcgctatgcattcctttatcagatgccggttgactacttcccattcctacagaatccgagtgacttgttgaaggagttaaagcctaagccattggtcgctcttcttccttcggcagaggagtatcgggagaatcgagttccgaaccttgacactcgctttcgattggcttacgatctcttgatgtcctctctccacttgagaagtcaaaatgccgttcatggaaacatcaacagcagcaatgttatcttctttccgggtcgtagtgacacgagtgatgatgaaagtggtcttgcacctgatcttcgccgtccttatcttacttctccggcacggttctctggggatggaccaacccctgagccgttatcttcggcaatgtatcgtcacccagaggacaagagatgtgttgaggatgatggcgcgtgggcctatgatctttactcgctaggcctcattttattagagataggcctatgggcaccagttggacgactttggaagatgaagtacgaccgttcatggttcaagcatcgagtggaagatctctatgtcaaaaaacttggcccgaagtgcggcggtgcttatcttcaagccgttcagttgtgccttgatgcccccaacttccacttatcgacacagccgatgactgacctcggtcttcgtgttccacaaatctaccactacccggtactcgacttgtcggaccctgatggcaccttctctttttcaatgaatttcatgtacacaatctgcaagattctttggtcatgttgccggattgatatcttttcggcaccctccgcagaagaattggatgactgcctcccgcttgctcttgtccctacccccgagccggtcaccattgaggataaagtcagggcatacaaatcatcgaagcgcgagatgtctaattacgacaaacaacttcccacaattcctaccgatgcatggggtgtcgtgaatgaagacaagttcattgaaaagccacacaaaaaacggaccgtcaagagacttccgcacttggaaataccagacgagcacctacaagagtggaatttccaaataatgcctcgagtgagtcgccttcttcagaaggttttgaaggagtcttctgagtcgtgtggagtaaacctcattatgactggcgagtcgcctgaaagtgccaaaacgacgatttgtgttacgtgcgccagtgtgaagaaagttcgaatggcccttaagaagcacttcgctcttggtcgggatgactgggatttgattgtcctccgtggcgatatcgagcggtccaaggttcctcggaacaggcgccgaaggccggctaaggctcgcccgaatgtgtccaatgatacaccttttcgccagcgagagctcaatccatgccatcagcagcgacctctgtgcggagcatctatcggcgcctttcagaacgaagagcacttaccccctgtctcatatggtggtgccgtctttgtcgatggcttgccgtatggtctaacagttcatcacatgttagaagctcctagcgaagatgagagcgaaggcattgactcaaatcaagatgccccttctcggtccgcggggaactggccccgtgatatatcaaatatcccacatcctggattcacgtacgactatccagaggatgactcatctgacgtgaacttcgacttcgaaatttccgatctggaggacgaggacgatccatcacacggtcttgagtctggatatgaagaattctggctttcagatgaagattcatcagatgatgactccgtcggccccgatgacgatgacggtgacaccgcgtccatcggcgatactgctggtatcgaacctggcgaagaaccccggctgcttgtcactcagccagctattgacgatgtacacgaagacttttttccatctccagaagatcgtgatgacgagcacctagcctcacattccctcggctatgtacatgcatcatcgggagtacggcgctggacccgaaagggcctgaaacatgaaattgactgggcgctcatcaaagtcgatgaagcccgtatggaccctcgcaacatcgttctcgacactactagatccagtgccgctcggccgggacgccctatcccgccacaacccatatttctgaaccaagtagcccggatggaggagctaggtggcttgcaagttcattgctgcggccgcacaagtggactgcaaacagggcagatatccaaggctatgacattggtcaaacttcagggacgacattcattttcaaccagcttttccgtcaatgggaattttggaggtaagaggtgcacttcagcggatccatgtttttgtctatacgatccttaattagatacccttgtttgttttttcatgcacgcccatcatttgttgcccttctaagctggtaaacatacagcaccatctcaccctaagacatcggctcgtatcgagtaagcatttcatgaagctaatctcttgattcgacagcgcctggcgactctggcgcatgggtcttcgaccgtcccaccggccgtgtttgcggccatgttctcgcctggtccgcaaaaagcaacaccacctatatttcccctatggaggtcaccttcgatgacatcgcacgcacgctccgcgcctcggtcgtctctcttcccggcgacccgaaccgatccatgagctacgtcgaccctacctcctcacagtctgctcaataccgctaccaagcccagcggcttccaggagacttgggccgtttggcttttgggtctggaggttctcccggtccgcctgtaccgccctatccccatcattatcctccccctcagccttaccattcagcctatggacgtcctccacctccgcctccaccccctcccggctcccgagaagctcatgggcctgtgtacagtggcccagtccctccaattccgccgtcacttctggctgggccccgcaatgtcgaacgacaacttgcttgatttttccagattttggaaaatctagattatgggaataagtttttgagactcatgtcatattggcctgagtatgtcggtttgttatatgattatgttttacggatgttgaggatacccatgatggagcgatgtttgttgtatttttgttcacccgctataaaaattatctgacgtgaattattcgaagagcagtattcatgaaaggggttattctcgattggaagtagatacaacacagccattgagaacatactgatctcgagactagtgctaactcggaccgtcggcttcatggtatcaaccctgcccagtggtttcccttcctttttacgatcattgtggcccttgaactagaatgcgtgtactattaccatttgcaaccgcaatgcctaacaccatatcagagaggcccgaatctcccatcttaataaattatatgaaacgccaggcagacatagctgataattttgactgcgttccaaccttggaacctcctaggtagttagcagttatttattagctaccattagctaatagatggcggcggccacccgtagacatccaatcgtcttttatattcctaattctgggcccgtttcctctgtatatatgcccttgctattgtacaggccatggtatatcaaatcccctattgtattcaagccagaatttctacttttgcacaggctttcacgaatccaggactcaaacattagctaatcatttgcagaggaacatcccgatgaagaccacatagccttttatatcagtatttagagcaatagaagtagtgaactaagtatacagagagaaaaaaacagaaagagaatgggattcactacatgcatctgtttctatgagctattaaaaatgctcaatggagaacaaagaggatcgaaaaaggattatagaatgtcatgagttgaaaggtaactcattatgaatcacgcccgtcaagccaactgatctacatttctatataacttctacggacttcataatttgttggctatctatggggcattgtctcaagggatattgataggactgatgttcctccatattggtgcattgttctttcatgctctctggtccaaaataggaaatgacctatcaatagctcgtgacttgaaaggtttcgccatttctgtctatcttcgaatttctatgtaaacaacgatatcgactctttctccgcccgaggcaaacgcgtcttcgtcacagcgcgtccgttccttcatctctgtttacttcttctctcattcgttccttcatctctatcttcttcttttctctcatcttcgatattttaccaaaaacttcttgaatctcataactctcatatcttgtctttccttgaatccggtcatacctcagcggttccgcttggctctaggattcaacgatgcatcatttgcacactttccatggagatcccgagctgggcagtcggcccctcaaagaatggccatgcagcccggatcgagccatcgagcttctcaagacgttgtatgacagtgataagcctttcttcacgaagaaaaacctgagagccgtctccaaccaactcaatcgtcgctacaatacacgaaaaaagaacagtgaacaaaagcaattggtctctgtcaagggcctcagtggctcaactatctattaccaagtgattactgggcgagtgctcataggagcagggaagaacgaagactgggagatgtaattcgttaatgattgccatccagggctcttctggcacatgaccctagctaacacatccacaccacaacagggaggaaccaaagatccgatacctttgctatgagcagctcacttcgtcagtgaagttggggagcattgaactggttgaagccttttttccattgcaaattgagcattttatgctcacacgcgcgagcgacaccaagctgcccatctccaccgagtacattgagaaccccgtacctgtggacgtgactctccggaatattctggatatatggaagcacaccactgaattccagaagctcgagtccctcctcaagcttgtcacccctcgtaaagtcaccaagattgtcggtatcgcatctggatcaatggaatttggtcccgacgatgaggattgcacctatcgtagcgccatgcagcattccatgatgatcactatcaaagagtctattggaaagatgacagataaaaagatcaaatgctatgcccaggatcctcgctacaccgccgttgacacctgggctcttgcggagtataactgcgaggttctggaggaccccaaggctttgcttgaaattgacgacgactgtattctcttttcttgctgcccggctcttccattaaaggagatcactgttgactttgctcggcctgctatgcttatttgggatcgagttgtcgatgaaccaaaccatgggcggtaagtcttattctgatgttgtattcacctcatcttgcttactgactagttcgcctagccacaacccgaactccactcgcgtacagaacatgatcagaaatgaatacgtctgccatgaattctgggacttgcgcgaaattgggactgctccctttaggtctgagcttgttgcttacatccgccgccaggcggagtaagatcatcgcaaagatcatatggcaaattaaggtgtgtcaggggatgggcaatgtgtctatttggccttgggggaaatgattcggtttctatgagttttcaggggaatttgtaaggccaataggagtctctgattgagtgtgaagccagtttatgtttgaagaaagcatcctgatttccgcgtctgcacaaagctggagtcatgtaattgtacccttcattgtgtatttatgtctttgtttctctgttgatttagtaattaatctcctctccatgtcacaatggtacattaaacggggctttccaaccgcccttggtcctgtgaatggagtaaaagacatatggctgccaaatataacactgccaccgaagttctagagtatatatatatattgcagtgggggtttccagagtaggatgactaagcggctatatagatagttagcaacgcagacaccttccacttctcttctcagtagtcaccccatggtgttctcctctctagcaccctactactcccagtgacgactctgctctcacacctgtttcgcaggcagggttgtcggtgcccctatcctagggtcccctcttcaatatacacattccctaattttcatccagagtatagaaaggtgattgacaacaggcgtagttttagacaataaccgtggacttgggtcctagtgactttgggtcttagagaatcaaacccccgattgtgatcaatgcagaccaccttgttctatgacggacataacggacccacttggggtgacccacttaacgcaaccttatcccaaaaaggacctgccaacttgatatccatagttccactttgtgtttgtatcatgacgcacatttgatgatgatcactaggatctctagatattgtcgacaatgctctactaattttgtccgcctgtaattttcaatacctattcacctcgtcaaaataatattcctggcaaaagggggtttcgttggctgtactgaaattaaaccagcttttgagttgtctatcgcctatgccatgggatcacattgtatcgtcctccattgaggattctgcaacgtatgcgccttgagaggaacagctgtcggtgatatgatggggtctagtaaattagttgtgtagagtgcatgatcctcggcgtctgatatcgatgtgacaaggcactgagacacaaaacctccacaccaatgagttctcttgcgttggggctagtcaaaggcaactccagggcctatcaggcacatctagctgctcgtgctaattctactcctcctcctcctcctcgtcctcctcctcatcctcatccatactctcccattcatcttcaccatcgctctgttcgagatctgtctcgttggaaaggacgctaagcagctgtaacaacccggcctgtgtgcgccaggcatctgaagatggcaaatttgggccagggccaccaaggcttgcgctatccactgctgaaggctcatccgtgtcaccggaggcagaggattgtttagagaggttaggggccaggctgagtatacggatgacttttgtaggaaagacacgaggaatttctccgccaggtattccgcctggaacgttagagtcgcgccagccgagggtctgcaatttccggtgttagccgttctgtttttatctttttgcaaagaagtcaaaaaggaactcacggtgtaggtagtcataatggcatcatcagccaacgccatgtaactgatcggcacagcaagctgtggtgcggagctggtgagcagcgagtatgaggcacgggcagggttcttcaaattttgaaccctattattgtcatcaagggcgacgacatagatcctatcttgaatctcgaacatcacacggtggttgcggattgataaccaaccaccaaggtcaaagcttgacccgtctgattgacattccagaatgtagctgttcgccgcaagactagcttcatcacggagagccttgcggaagtccgggcatataaagacacgaccagcgcgagagaagcccacgaagagatcgccgttcaacattcccgccccccattcatcatccccatgccagacatgatccgggtcatccggtggtgacagtggaccttcagcgacctcaattggtaccaaacaatcctttcggaaagctccgggtgtgaggggttgagttgttaggccaagtcgcgcagcgcctgctagtgctgcactcgtagaagcagaggcggtctttggaggaaggatgtgatatttttcggtcgactgggacggctttaaattgcctaagagtgcaccggattccttgctgtgggcaaaatagccttttgagcccatcgaataaatcacaatatcttcgctttgatccagatggccaatgccacccccctcaatcctcaggtcggtggtcaacttgggaggtcgctgtgtcatatcgtacacaaacccccgaccctcgttggagacaacacatagagtccaataggacaattggaaccctctcgtgtggcaatcatggcacaatgtagcgatacgccggaactctccacgcttagcaccttcaaggtccgtctgccaaacctcgagcaaatctccttcactatcgaacacggccattccatcctgatactccaagtgtgcgtgtgggcgaactccgtctccgtctccttcggcgtctagcacggaagggagtcgccagaggaggcggcccgtgtccatatcagtgacattcaatccgccaccatgggaagtggaaatgaagaaccggcgcttgaagtcggcacggaatctccaaatgggatcattaccgatttgtaccaccgattcctgactgactggatgcggttgggcccaattaagggcgagcagtgtctggcgcttgcacaggtctttccatgatttcgtgccctcgaatattttgctaaagctgtgggtatcggcgaggaaggagaattcacggctacccccaagcggctggacggttttagcttcggatccataaatagcttcttggtgagtgccgtcgataaattggtgccaagccttggaggtcgcggtcagggacgcaaggccggaaatgggggtgaagtgcaagatttgcaggacaatctctgggggcaagacactgagagggtctactgtggatgatacggcagtcatattttcaaaaacaagcaatgcagagttgtcgcagaaagcaaattagagaggtgggggttcgcaatatttcatcgttctccaccatatatacgatgacgtagccggtttagacccgtggatacagcaaatagcccccggggctccaggggaagaacctagagccttaaaaattttaagcttaaattattttgatatgcccagatttcaatccgccatgtcctccaagtactagattcttcccatccaaatctgcgctgcaatgcctgcttcagttcaaggtacctcattcgctcttccatatgccgaacaaactctcgctggtctgtatagcgaataatatcttttccaagggcattactccgtacctattgtcatatatgacgaagtgagaggctgggaagagttgggttttgctgtaccccgcaagtacgagcgagtacatacgacaacccagcataaattgaaaaatgtcccgtcgcttggcacccaaggccgagcgcaaagcagcccgattacgagacttttctggtttttccctcttattcctcatcaaccatgggtaacgagacccttcagcagttcgctgccctcgacctcgactacttgattataggcggaggtaccgcaggtctagctgttgctgcacgcctcaccgaggacactggattccacgtgggagtcatcgaagccggcccatcggtcttgaacatagatgataatggcgcgatcaatgttcctggtcggtatggcgaaaccatcggctctaaatacgattggaaattcgaaactaccccacagccgggcctaggaggaagatcactaccatggccacgaggccgtatattaggcggcacaagtgcgctcaatcttatggcctggaaccggggtcatcgcaaagactatgattcctgggcggaacttgggaatgagggatggggatgggaagatctactgtatgaggaccagctttctgggattcgcgctctgtcttggatctcacccgctgatctttgagatactgaattccttccaggccttttttccgccgcagcgagaatttccacccaccgagtgccgctcatcagaaatattatcagtcttcctatgatccccaggctaatggaacgaagggccctcttcatacaactcatgccaagcagtatggtcccacacaccaatattggcatgagacgctcaataatctcggggttccatccacgcgcgatagcctggctggcgataatacaggtgtctggaacatggtgtgcacaattgatccagatagtcaggagcgcagctactctgcctctgcatactaccaccccatctcaaatcgcccaaacctacacatactgactgaagcaactgccatggagatcctgtttaattgcgacaatgatgattggtacgcagcaggggcccgagtacgctggaacggactggaagcaaacatcaaagcatacgaagagacaatcgtctgtgccggtagcgtgcaatcgccgcaacttctagagctatctggtattggcgatcaggaagtgttaagagctgctggaattgagatgaaagtccacagtcccaacgtaggggagaatctacaggagcatatgagtatggaatataaacagtgttccttgtgatctgagctgacgtgtttaagtgacggccaccatcttcgagatatcctcgacgattccaacccgagatgacatcctcaaagaccccattcagcgcgaagctgcggaccgcgcgtattacgcttctcaagccgggccttggactgtgatgccctgttcagtggcgtactgtccgctttcgaagatcctatcgcccaaggaatgtgatgaattacacacccaggccaaggaaatcgcgcgagagacaggaaggacacatgacgctattctggctggccaattcgagtacggtcatgcgcgcggtcaaatcgaatatctgttcgaccttggtaactggagcccatattttgtctctgagccaggaaagaaatacgccacaatgctgcaaatgctgcaataccctttctcgcgcggatctatccatatccctgctatgggcgaacacaattatgaaaaggccacaattgatgataaacccgtgattgatccgcgatattttctggggcctggggagattgataagaaggtcatggccaaagcactcaggtggggagatcgaatctgccaaaccaagcccttggccaaactcattcgtcgtcgagtctttcctccccctgccaaggaagcagactctgaagagaaagtatacgaagagtttgtctcaaattatactgtcactgactggcatcgtatgtttcccctccaagattcattcagcaaatcactaaatatgcgtatagcggttgggacctgcgctatgggtgaagcagatgggaccaatgctggagttgtgaatgatatgctacaggtgcatggcgtctattgtctgcgggttgtagatgctagcatcatgccattgcaggttggggcacacatccaagccaccgtatacgcgattgccgaaaaggcggcggagatgatcatagatgactattttgctcgaaacggtccccgatgaatcttgggcttgcatatgatatcttatctatatggccttgtcaatatcttgcccggtaatcgcacaccaagaagggcgtcacgacagcaccactgattcatattttccaagttgtcattgttacacatgttccgagctgaaattctgcaaatcaagacttagtttcctgcgaacctttttcatttcatgcttagctggctcagcatggattgctccacactcaagcatcacccatggctatgaaacatagctgtgcacacacgcaaccctggagatgttccccagacgaagatgctccgtggcacatcggaatttttcaataaaaagaaacaccaagacttaggatggcgcggattgttaaacaaacagaccggggattgaaagcagaactccccgatcggctaaagccgacgtttaactctccccctccttgagaggggcaatcttcttattttgtgccgattgcccggggaattcattcggatatttttccagggtctcactggaaatcttattaaactacattcaacttcgtgagctaacaagacttccacatctcataccatcgtcaactatctctttgcatctctcatccgacacggaaactgattcccgcgcgacttgaatatataccggctcttgctcaacacaccatcgcatatatcctctatcctactatcctacaatgatttctggaatcgcccacatcaatctcaccatccctcagggcacattagaccaagccgaggagttctacgggactaccctcggactcacttcggcgccggtaccggagctccagaaggggacaatcttatggtattgaagcgagctatttccaaaagaaaaaaaaaaaaacatcattttctaatatcaacaggttcaatatcggctccagtggacagcaagtgcatattacccatggtgcgaccgatccccaagctagccggcacccatgcttcaaactgccttcccgtgaggaactagaagagattaagacaagcatttataaccatcacgtgcggggtggtcctgcagccccaatggctgccgataagcctggcgaggcgaactcaggtgagagatgtcttgatatcattcccgcgtacggtttgctgatcaactacagggacccaagggaaagaatatcctacacggttcttcgctcgggattttggcggaaacttgcttgagtttactatgtaaatattctgttttgagtcgagttctaccaaagtgcgggtgtgggatcgaagagaaacagtctaatattaacaatttcaatcgatatggagtcagcagtcctgtatggtctgtctaagcagctactcctctgagttcatttcagaattgctagggaattgtcgactcatgaggtagttagctctggtctgttcagaacaataaatgtacagccacatacgatgatgagcgcattgtggcgtaaatgcgggccaaacccaccaaaccgacgaattggagttgccgacgatcccgttgcacagccccacctgatacttggacgttgcgcttcccttcaatctcaccaacaacacataccagacaagaatacacaacatcatctactatgggtaaatcaacacctatagaaccagctccagcctatgatgacctgtttcatgagcgcggctcaagctcacgaaatggtgtaagtacattactcacccgaagggatgggtcataaagtccagatggttccatcaacatgctaatcaacccaaatgaatagtatgctatggtcggtcaaacagacgataccaccgatgaaacccgagacgtggaacagggtctccacattcatggcgtgcccgcccccatcgaagtgacagcggctggtgagctggatcaacacactcactgtgcggaatgtgatcggcagcaggaacgcagagagcgacgggagagttcccagaaagcatgtggcatggttgcgacaaccttcatcctgatctctttgttcctgatgatattaggaatcgttatcgttggagcttggaaggatgtccgcatgaagaagtcacacggttagagggtgttgagtttcttgaaatacctttgactagaatcatatcgcatagtagcttactgtttgttgtttacttcctttctttctgttaatcatggagagaacttgattttattgaatattgtattgaatattagaattgaatagatcaaccccgtagtcgtatataagaggatccaaaaccaaaaagaaaacaccatgcaatctctaacaagataaaaatccaaccaagagaaaaaccatcaagtcataatagatgtttctgtccaaaacatatgcaaacgaatctaagcagaaccgagatacttgagcacattctcacgttcctcaacaggcaacatagaaagcacttgctgcacaccgcgcagaccaccctccttgttcccaataaggagttgagcaacctcagacgcgacgccatcagtgcgcagagattcaaccttgctgtgaataaccttcttgttctcctcgtaccaagcagcaaccttttggtcattgtgctcgagttcctcgtccaacagaccagtccaggcgtgcagggtgcgcaggtgcgcagcacgaggagtctcgccgaaagcgtcggcaccgggggcagggggtgccgaggcggcaaccatgcgcttgacgatggtctcttcgctaagacggcggcgcagccgccagtagaagaagcggcgggagttgacccactggagaggcttgcggatggccttcttggcttgcatgcggccggcgcggtcgtgcaggtcggcgaattgaagtgcaatctgcatgtacacggggaggagctgttcctcacgggcggccatatttgccttgactgagctgagctgctcgtgggtaagggaggtgtcagccagggagcggcggagctcgccgtaggtcgcatccaggcgggccatggtgtccagttgcttctcgcgacgatacttgatgttcaccataccctcgggctcgaggacaccgccgcgggattcttcgtcggcatacatctccatctggtcggggttgatagtggggtcaacgacgacccaagatccaccgcggagctctccatgaggaggaatatacacgaagatgggctgctcgtacttgacgagagcgtcgacgatatacgaaccgtacttgagaacctcgttgtacatgtcacgttggccaccggagaatcctctccagttggccaggatcatgacgggcagctgctcgccgttgttgaagtcgcgcagagcttgggcggtcttgtaggccgagttggggtaccagacaccaccagcctcggtggagatcatctccatggagtctgggttggcgggatcggcaggggtgacgttctccaccgaacgagtctcgacggcgatcacacccatggggataccaccaaggcgggcacgaccgacaacgacggtgcgagcccagccaccaagggcctcctcaaaggagcccttgtcgaacagaccgggaaggaagccgtcgacgtcctccttacctccgatgagccatctgacatcataagcctgcttggggggagggaagtagccaatatcacggtcccaggtatccgaccaggggcgaatggggataggagcattcttcttgtcgggaacgaaggacatccactcaacgatcttctcaacaccttcgaagtcatcggtggcagtcatgtgagaaacaccgtttttatacatgatctgagtgccaccaagctgaaggttggaggtgtaaacctcgcgaccgagcagcttgttgatggcaggggcaccagtgagaatgatgggctggccctcaacctggatggcacgctgaccgagacgcacaaggtaagcaccgataccgacagagcggcaggtaacgagagtgatggtgaagatatcctcgtaagccttagaggtggcaccggcaatgagaccggaacccttcagacactcgacaccaagaccgtccttggcaccaatcacggtggtgatcttgtggcgctcctcgccctcgtcgttgatgagctcggtgatgacctccttcttcttgctggcatcgaagcgcttcttaatctcgggagtgaggtaaaggtacttgaaaccggcctcgggcttctccggtttgttccaagcaaccgagaagaagggaatcagttcatcggccacaccgatgcgggcaccagagttagcagacaagtagatacggggaatacccaacttgcgggcaagctcagtgcacttgtggaagaacttgtcttcctggggaccgaaagaaccaatctggaaggtgatgtcgttggcaacaatgatgaaacgtctgccgcgggggtactcgggagtacgggcagtgacgatccatccaaccataccgtgggtgttggtaccaggctcgcgagacacctcaacaaggttgtcggtgtcgtccaagaccagctcactgtagtcaatgcactccccaacaggggggcgcttctcatacagggaaggaattttctcggcaatcttggtccagctgttttggaaggcctggcggaaaagctcggggaaatcgtacacgtactgggttcccatcaagtgagccttgtagcgcttgggctgcagccactccttggtagggtacggggtggagacagggcgcagatgcatagatcccagcttggcagtaccaccaatgctctggaagatccactcgcccttctcggacttgcgctcgatatacagctcgatattgataatgaagccgtaggtgttgctgataataacacgcagggggtatggcataccggtagccgggtcggtgcaaaggatgcgaatttctgcgccagtgacacggaggcgccacagacggcggccgaagcgatcgaggaaaccggccagcgcttgctcaacatcgactggctggaggttgaatacaggagagaagttgatgaagatgtggttcagatcggagttgttgttgccaatgatctccagggcgtccaggatatcgttcatgaggcggtcggcctccgagatcagatactcagcggtggggatatcgtcacgcagacggccgggacgaaccacggcacgaatgaagtagcgcttgtcaatagtcttgtcattctcaacgccctttccaatagcctcgtagacgtgaatgttacggttctcggtgaaaacgggtttgatgttgaacttggatagacggccgagctccaactggaaggcaagagccggctcactgtggcggatactcacatcttcctcgtagtggggcccacggaaggtgaagtaaccgggatagacaccttgcttgccgcagatgaaggtgacacgacgaatacgacgggcaaggagctcatccttgttgtcagcgagcagctgcttcatttgttcgacaagttccgcatcttccatgtcctcgatatcgcgaatggcaatgttgcagactccagtgagctcactatcactcacaggcttaaggccggggcgacgcttgccttcaaggctggcaataaggccctgctcgatggggcgcttgatgttggagccaccgagagggaagacctcaagagccttggagaggagctcctcggcatcctccaagtactgcacgggaatgataacacccttgcgcacggggtcactggcagcgtcactcacaaagagggacatgtcgccgatggagttgatccgcttgaaggggttgacctccgtaattggagtgcccggtgcggacggctgagtggagttaagaacaccgaactcacgctggccgagcttgccaagagtgaagtcccaagacaggaagggctgctcattggaggcattgtattcaattccctcgagagtgtatgcacggtaggcacggcgaacgtagacttccagggaggcgagggtgacccaggggtcagcatggacgaagaaccgaggaagaacatcgaagaccgtgtacttcgagtcaacaacctccttcaaaacatccaaggaaggttcgcggtgctcccatccggtctcaccgtagcgagactcgacaacggaagatcgcagaatgtgctccatctgcgacaggcgctcatccagagatggcatagcgcactgaatcagaacctcacgggctttgagggtaactttggcagaagagcgagactcgagctccgtcaacttcttgaggatgggcttgaagtgtgtgccaacattctcgacgaggggctggttggggcggtacatgtccaaaatggccaacaccaggttgttcttcgaaccgatgcggctgtgtgagaggacgatgtggacaatgctggtgatgtcatctttgttctcctcgcggagcttaagaatgacatcctcgtcgcgaaggttatgggtagaaaacaatttctcaacgtcatagtactgttcgagcaagccaatgaagacattgtactcgttggacttcaaaccatccatgtacttgttaatgacctgaaccaggggcaaaagggtggccttgagaatctcagcatcggcagggccgatgttctcttcaatgaagcgaacgatggccttctggagctgcttggcagggaactcggccttgcgggccttggcacggtcaaccacgttctgcagctgagtatccagcctctgaggaatacgagagtgaagcgcagaggactgcgcattccactctccatagggaagatcagggttgcgcaacacctcaacgagatccttcagggtggtacccatgatgacctggttgtcgaaaccgcgaagaatgttctccaaaatgctgtggagtaggaagaatcgctgagagggcttgttaccgagaacggtaggtgagccaagctcgggcagctgaccagtgaagggctgagcgtgcttaactcgggaagggtcatccagggcgaggataccgaggatatcaccggcctctaaagtggcaccgggttgcttgatgagctgcacgataccatcctcctttgcgatgaggggcatgtacatcttcataacctcaacttcagcgtaagactgaccagagcgaatgtgctctccattctcaacggtgaacttgacaagcttaccgggagagggagagcgcagctgagtcggatcgttctcctgctccaagaggcaagttttgccgtcgacactgagacgggtggcagcagcctcctctttccagtaaacgttgtgactgcggccgctgaggaggaccagcaagccaccatcagccagagcacgaacaccgactgagcacttggaaccgttgatgaagaggtggtagctgtccaagctggcacgagtggcggtgaacttgtaacgctcgccttcatagatgaagtcgacggggaaaactgtcttcaagatctccttggacgggacctgaccctttcctagaccattgcggtattcctcaatgccagcctcgctggcgaggtgggccttggtgacggcaccacaaatgatggcgacgttctgatcgggacgctcagcagtcagcttgttagagataagctggtcaagccatccagtggtgatagtgttgtcctcgaatgcaggggtttcgagaagcttgatcagatattcgacagtggtgcggaaatcaccacgaatgctcaattccttcaaggcaacgaccatatgcttgcgcgaagcggatcggttctcgccgtaggcgaaaatgtgaccaaattgactgtcggagaaactgtggataccaccagcagtaccgacagagaagtaaccccagacgttggaggaactgcggaagttcagctcgtgcatggtaccactggaaggtttgaaaccctcgccaggatcctcggatgtgatacggcaagcagtggtgtggcccttgggctgaggacgacgctgggtctggaagctctcttccttggagaagtcgaagtcaatttcggtggaggcattggggtcgacaccgtaaagaagacgaatgtcacgaacgcggtgcagggggacacccatggcaatctggagctgggcagcgggcaagttgactcccgaaaccatctcggttgtgggatgctcgacctgcagacgaggattcaattcgaggaagtagaatttgtcatcggagtgtgagtagaggtactcgacggtaccggcagaaacgtatccgaccaaccgaccgaggctcacagcagcgcgctccatggcctggaaagtgggctgtttcgcaatagtcacaggagcctcctcgataatcttctggtgacgacgctggacggagcaatcacgaccgaagagggaaatgttgttgccgtactgatcagccagcaattgcacctcgagatggcgagcgttaccagccagcttcataatgaagataggcgatcccggaatctcgttggcggcggcgttgtacaaggcgtagaactcttcctcgttctcgacctttctaatacccttaccaccaccaccttcggaggccttgaccatgacagggaaaccgatttctttggccttcgccaaaccctcttcgggggaaaaggtgcaaccctttttatagacctcatcctcgactgtcacgataccgtgttcatcgagtttcacggcgtcaacaccggttccagaccagggaatacaaggcacaccggcgtgctgtgcaacaatggtagacgaaatcttgtcacctagcgagcgcatggctgaagctgggggtccaatgaagataatcttcttcggtgacgcagcgagagattcgggtaaccgagggttttcagaggcgtgacccctacacaatgagcgtcagtatttcgtttctaattttcctctctcggtcttctcggtatctccaagccacttaccatcctgcccacacggcgtgaacatccatccgctccgcaacatcgacaatcaactcgacgttggcataattattattattggttccaccgggaacctcgacgtattggtcggccatgcgaatatagtcggcgttggcggtcaaatcttcgggcgtggccatcacggtaaattggatagcccgctcgttgccgaaggtctcgtaagcccatttccgcaccgagcgaatctctttcacggcggcgataccattgttggcaataagcacctaaggaataagtcagcctcacggtcaatttcccaattgtttcccctcgcaaccacggttgttctttctatttcctacgtaccgatgtgataacggagtgaccttcgtgggctgccacgaaatctttcacaacgctaggaggtgctgattcaagagcgttgccaccgatgaaatgtgagggaatgtcctgtttgctgacagtcgagccgttgccatttgtgatactcatgatgctgataatcacaggtcagattcccgtataggaattgagattctgctttcgcgcgggatgcaacagcgctgattaaaaagtcggtaatgtacaatgctgggagtggcggaaagagcccgagtggtggacgtgcgtagaaaaaggtaaggtagagagagggggagaagaggagtaagataatcggcaggagtaagctctggggggaagaaaggccaagtcagcatgtgtagttcaagatctcggggcctgaagaaagatcgcgtcgaatgcggaattggcctgccaccggatagggaaagggtagcagtactaaccgggaaccaccaaaccccgaacaagaaattctatgtaagattgaatataggaattgaagagatgcagaactcaagttcaatcataaaaagtccacggggggaaaattgctgagaagatgattttctggaggtcccacccaagtggagatgatcccaactggctgtgattgattcccttgaatggccgaggacacatgtacctccccatactgttaactatgtaaaggtaccttcccaggaacgggctcccccaactccctggctttgttgggccgggttccactataatctgttgctcaccacttctgccgatttttgatttgcttttgatttgattttctttttgttttagaattaaatgttgaagagaccaatccaggcgtcactattaggtagtataaaaggattcactgctagttcactaccggtatgtaactatacatatcctatgatactaccccagtttggtcagcagcggaatcatttgaaatcattcaagattcaatagtaatggaattactcaaacttgggaactccaaggtcagactgtttgaacgatacagaatacatatacggagtacatatacggaactccgtaagtactccatacggagtacggagtacggagtactatatagagatcgataatctagattcaaaaatatgctccacgtcattgccaatctgagaatggcgtacacgctatcccaattcggccaccttccatcattcaacacgatcaaccttccagggtttggtgcaaattgcgtatagaaaaatcctcgtagaccaatcatattcgtgaccaccatattccaactcaacccattctccccagagccatggatctgggccacaactcaactacaacgccaaaatggacggttaacctacgttgtacatacaatttataatatggagcataacatcatgggtattattcgatcttaaatgaaaagacaatcgctgagacacagcttagaacgtccccagaatccaccgggggccatatcgcacaaatgaaccagacctggctggtccgagaccggtcaacatgcagaactgtacaggaagggatgtaaccagggcggtctgcaccctcactcctcttgcggaatgcagtcgatcacagtcaatcttagaagtctgtaaaacaaacgttgaaaaataaccctagcacaaaccacccagtcactaaacccccatgcaaattccataaatactagtggcgaagagaggaattaaaacgtctctcccaagtcgctgacttgggtcttcctgtttggcggcggcatggtaccaggtccgatgctagtcttgaagcttcggggagctgggatgccgctgatggttcgcttcttcactatgggggttggggtcgtagtcacggatgggcgttgaaactcctgggagatgtggggaactgttggcgtggcaatatcttggtcctcatcgataagagacatgccagcgatgttagggagttggccggcatgattgctaagagatgaccgaggccgccgggcttcggtcatagggtttgtcgagtagtgacccagtggcgttttggccccaggacgactcgaacaactttcgggccgggcatttacgtggacacccgagtgcacgctctggctgaaggagccgcggctagagaaactagttcggctgctcggacgactctcgcctgtccgtccgaatgactgatgacccggtggagggtaagatggggtgctttcactatctcgggctgaagaaccgaggctactgttactcagccgcttgcgagaattcctccgaacagtgatcgacgagggaacgatcggggtgtcgctgattacggatccggaacgaggggatccgcgagaggaagtgtcagatggggcgggaagtcgcgatttggctgattggacgcgctcttcgagcttctgcatcttaccaatcaggccacggatttggaacagtgagccagacttgggaagccccggtgggcgcgaagtgctcattctcgtcaaactgttgcgagacgaaatcgacatggagggagtgggccgactattggcattggcattggcattattaccattgctggtgctatatgcgccattgctgtaggcgagagacggggttcgcgaatgagtggtgcgcggttgagtccgagcgtgaagggttctagagttcaccggatccgcgccaccggctctctgtcgagggaatgttggcgtggagtttgcgtacgggttaatcgacttgcgaatgttcacagacgactcggagatagggggtgaaggtggggtagcggtagatgacgcaagggatgatttagcgggaggcgtggcaaatactggggaagatgtagcggtgccaggcgaacgatcaaagatctccacactctgtggagttgccgggctgcgatgatacaaaggagtgggcttgcggcgacgcaacccatgcccttcggtatttcgaagcttctcttggatgatctcggcttcaatcttcagatctgacagctcgtctcggagtcgttggttatcgatgcgcagctgctcccgctcttgctccccatttctcatttcctcctctagcaagaccccgcgctcaatgccgatgttgtatttggactccatgtcctccagggacgaggtggtgttccgggcttggcgctcatagtcatcattagcaacttcaatatctcgaagcttgagctgcaaagtgcggttcgcgtctcgaagtgtggtgatttctttctgaaggttgttctgcacagcgttgccttcggttttcgactgcttgtatttggtctgccagcgcaatgttagcacctgcacaattgtgagcaatgagcatgatcccttaccttccactcgtcgacttcatatcgcattgtgtcgagcttttccttcagttgccgctcccgcttttccgaagcttcaatgtccttctccatctcagcctccagctcccggctggaggactgaaagtccgcaagctccgcctccagttgttcatactgagctttgtaatgagccagttcatctctgtaagaactgctcgtatgcttccgttcggaagatggctcatcgacggccggcatcttcttgcgttgggcagaggaccggtcgcaaagaagacgtctggacgacgagtgtcgtccaaaattggcgaaagtcagtacagactgtacaccaggctgtcttgccctgcagatcgttccagcccctctcaaagactcataggttgtgtggtggcccgatgtcaacaaccgtgcgttttgataagagcccctcgccgaggcggtgacgcaagggattgattgcggtacctagtagtttgtccctctatagagggaggaagagaagatcgaaggatgtggcgaactaagatgtgcaaagctgggttaccttcgacccgcctcgtgtcgaaaagcgggttcgattagatcgggctgggagaaaccgatgttgttgttgcggtcgtcaggggccggtagatgcgctagtcctcatgtagcagatctgggctcagccacccaccgctcttttggtacgtcaaggcagaaacatattgcctcaggcatttaaggcactaacacgaagctaagcctcattggagctgaaagtgatcctgatcgacctcagccccgtgatctggactcagcagtcgccagtccccagtctttaggtctctagggcaatcaagtcggagaggtaagtagctttgtctatctttcaatatttgcactagaactctctgtggcccttcaagctccaagcacaagtgtttattgcctccagacactaccctggatgttatgcccacgcacgctgttcttaagatcgctgatcatcctgtttgcttccacgcacttgtttacccccgattattcgcaagctccatctatctatcccagtgttgaggcgcatcggctaaacgtgggatgatggtatgacatctgaacttacagtttccgccccttaagtagatcccgctcagtgaggctaaggtccagctcgatctatcaccatggcagactcaaccgatctcaaccttgacgatgcgcccagcgaccttcaagacatccccgaactagcaatgcaattagttccgcctccagaggggacataccctgacaagtaagatctcatcccgtcgccccttgcctagtgggaccaatatcaacactttatgtctacagggcctctcttctcgccgcagttcaggaccatggcaaggaacatggctacaatgtggttgtcaagtcttcaagcacgcccacggagaagaaacctggccgcaccgctaaggtgtggctgcgttgtgatcgtggcggccactatcggccacggaacggtctgactgaggaaacgcgcaagcgccgcagaacctcgcggttgatggattgtcctttcatgctagtcgcagccggttctcccggtatctggaccctgacagtgctaaatgcgacgcacaatcatggtcctattatcgagaagccgcggcaggtgcctcatcacaaggtccgcaagggccagctaccagccactccatatgattggccccatgatgcttcattcaccccatacaccactgcgcttgtgataattgacatgcaaaaggactgtgggtatttcggactattaccactatcagtgaaccaactggctgattttgtcctagtctgtttgcccgaaggatacatgggatatcagggttatgatatttctagcgcacaggctttgatccctcccttgcaaagattgcttcatgctttccgctctgggggtttcccagtctaccatactcgcgagggtacctagtgtctcgtgcttggcttttagtatgcttttactaattcatatcaggacaccgacccgatctatctactctctcaagtcgtgaggcatatcgatcccgtaacaatgcatccggcttgggtatcggttcccctggtcccatgggccgcctacttatccgtggcgaactgggccacgacactgttgacgaattgtatcctctacccggtgagccggtcatcgacaagcccggccgaggtgcctttgcacacaccgattttgagctcctccttcgcaacaaaggagtgaaaaacctcgtcattgcgggtgtgaccactgatgtctgcgtctcgacgaccatgcgcgaagctaacgaccgtggctttgattgtgtcgtcttagatgatggcactgcagccgccgaaccatcgctacatttgagcactatacaatcgatcaagatggaaggcggaatctttggaactgttgccaagttggaagacgtcattcacgctgttgataatttcaaaaccgtcaccatgaagaagctggctcctcagatgaccgtctaagtatgtactatttcttttagccggttggctatggacgctaggattggaagggatttctcgggcgtttgggactggagttatctcttttctgctgagatactgcagtgcgcatactcgttgcttttctttttcgaatcttttcttttgttgaattttagcgggccagggacttcattgatcccagatagcgtcatttcctgccagcaactttaggtgcaggacaatagccattgcacttctagttcagtttgtcgtgttaaatctaaaataacaagcacacttttgtttgtattacactacacgctagattattgaccttctccttgactgtagacttatttctctgttatgcagagcaagtcaaaataatgcaataggcacagagaaagagccaactcccaagagaatacatgccctaaaaacgccacgctcatgaacctagaactcccaagaaacagccaggctacagccattttttccctgcagcagtaatccgcgatctgaaaacaggactcttgatctccattccctgcttatagaatgggctcatcgccgtcttaacatagctctcgtatacctcgttcatgaactggcgcacagcctcttcggtctgcggggaggtcgggtttgcggcgatagagctggaggaggcgcgtgtggtcgatccagctgtgcctagcagtgaggaggagccaatgctgccgcttgtgctggttgaagaggggagatgcgggggttggtggaggaggaggaagcgcgcgccacttggagtgaggaaagccgtgatgtaggctgctgccggcgggtaggtgtcgatatgcttcaggtaccttttgtgataatgtcaggtttggaggtttgatgtgggatggagcgcgggctgagggtggtttcctctgtgtttacatgcccctcgtggattcgaaccagttcccagtagccatttgacatatgggatagcttgttagacttacattccaccattggtccattgcgcttcttccaatatgtccagacttgagtggatgatgaactggttcatgtactgcgctgtctccggaaagcggaagcgagcaatgccatcaccaccccccttcgatgtgccaaaggcgatgttgaacaaaggtgtgtcagtgggtgatagaatggtgaagtagtaggacattttgagcagattgggattattcagggttgacatggacccaaacatggccgaggagctgaggattgcgggtttactagtggcccccatcacgtggtcgataagaaatgagctcgtccgggtgaaggatgtatacacttttgatgaaagttgaaagttgaagaatattgtaataatttgagttctgttcaactacatatgcagttcaaattcattcgcacggtctttaaaggatctttgggtgtgatcttgtttaaccaggattctcgttcattatatatctttgatcgttacctataactgaatttgatacgcgatttgtcgggcccattccagtccaattaagcaccgggcgtggcttgggacttaatatacaactttacctaggagatagtcaaaggaataaatcgaagtggccttttccgcttgacagatattagcataaaatatctatatcttcctgtctttggggcgaaagatttagccgcaaaccgtagaatacccgaggaacggggtaaagtcgatgaaatatccgcgatctgcgcttcaccagtgactatatatgattatcaccacatgtacttgcccctgagagctagccagccaccaggcagcatccgctcgtagcttctttttggactcagatactccgacctccagaacaatcgtgggccacctgtcatttcgacctggaggaagttgttcggggatccatgaaccatccggttctttggagcaaatgtttccttctacccttgcagttgtaagggaacatagcgttcttcccaaattcgcaaataatatagccctattgaattctgactggagctcacccacgatggcatcatgcggtctgcctggtatggtaacgatcatggcccgggtgtcggggttgtagagctggcggcatcccttggagagttttagatttgctacatctggtggtacattcgtgaacttggcgtatgctgtcaccagattcggggtacttcgcagacgagacagaatagaccgaatgctccgggctgatgatccgatcgcttccaccgcacattccacatcgaaacagtcaaagatcagttgtgtccatgatctttccgataagaggtgaagaaaaaatgatccatttcggtacgattcaaatcacactagccctggtaggtctcatggaagcttctggtaatcagtcaccaagtcctgcgtgagaaataaccagttagtcctatgagatggttattatgacatgcagttctccccgcaaaagccaccagcacgtgataaactgataactagccacggctttatcgcggccgatcacggtcgatcgcggtcgcaacctttgaccttggcaagcacttcctgccaaacataccagtttcgttgctatcaccccgggtacacaaagccctaaatctgcttgcaaaacttaagttccgatatgcccacaaatctcccctacggattgaaccttccgaacaaaagtctcgcggcgatgaaaccggggaatgctctcgcgcagaaaagaaagaacatttttgatgacgactctgaagatgaagaccagcaaactggcgatggtgcagttgaaatctcaacaattggaggactagaagagccagctacgaaaaagaaacctctgccaagcgcagggcctccgccgaaacgcaaaattcaattcggtagcggtcccaaaccaacagcaaaaccgctcagcaagaactcgctatttgcagacgatgaggatgaggacgaggaaaaaaaaagagagcaacaaggcgcaatgaatcttggattgaaccaggcgaagtcgaacaagccaaccgctcctgtccagaaatacaccaatctcgcgtccatgcacagtagcaacatgcaggcaaaagcggcagaagaaatcgacccactgatctactcatacgatgaagtatacgacagtttgcacgccaaacccgccaaggcctcagtggaaacaaagagcgaaacacccaagtacatgcagaacttgctacagagtgcagagatccggaaacgagatcaactgcgggctaaggatcgccagctagccagagagcgtgaagctgaaggtgatgagttcgaggacaaggagaaatttgtcacctctgcctacaaggcgcagcaagtggaactgcggaaggcagaggaagaggaagcacgccgtgaaaaggaagaggaagaacaacgcaaaaaaagtggcggctctggtatgataggattctaccgggacgttctgtcgcgaggagaagcacggcacgaggagctcattaaggctgcggaagaaactgctcgccgcgtcaaagcaggcgagatcatcggggagacagaggatcaagaggtcaagacggatgcccagaaagcgcaggatctcaattctcatggaactcgagttgttctgaatgatgagggccaagttgtcgacaagcgtcagctgttgtctgcaggactcaacgtggcaccgaaaccgaaatctcaagcacctgccgccaaatcaggagcttcaagacctaccgctggacgaccaagtgccggtgctggttaccagggtggccgtggtgcccagcgggctcgacagaccgacatggtcgcaacccagtacgaggagcgtgcgcgacaagaagaagaggccgaggctgcaaagcaaaaggagatcgccgaaaagagtcgcagtcgcaagaccgagaaagatgtgtccagcgctaaagagcggtatctggcaagaaagagagaacgagaagaggctgctgccaaggaaaaatccaagggggcttaagtgtatgcaaaaggcgggctggatgtgttgcatccatggaattttggaatatttaatattgcatagcgctgggggagaaacttgtacattactctcgtgataccaaaagagacccgactttgagccatagggctgtttgctatggacgaaccttgccgtagaatctagcttgggactataaatatgcttgcccctttccggacaaaatttttttttttcattcgcctcttgattttcattgctaacacttggtaagttctatcgccataactactctacactctcggaggaaccattgccaagacctcttaaccccggcttacattaccagcttacctcataactatcacatgaccccacacgggctgagttaatccggaccgaaagcactcgctaagccgccccacacaggtcgcactcccaattttgcactcccaaatcgagattcaagaatcgcttcatcaccaaaccacttccatctcccgtttatcaacgtcaatcatccaacatgggtaaggttcacggctctctcgcccgtgccggtaaggtcaaggctgccactcctaaggtgagttctcttcgatttccagccaacgacactcgatacacgatcgcagtggccatccatcccaccagcctttttaacgacgattttgcatccaggtcgagccccaggagaagaagaagaaccctaagggtcgcgcctacaagcgtattctttacacccgccgtttcgtcaacgttaccatgaccggtggcaagcgcaaggtacatatcgaatgactcaacccacacaaccaagcacaagacattctgcaaatatccacgaccacacaatacgaataccgtgaatggaggacagaaaggctgaccaggcgcaaaatgcagatgaaccccaaccccggccaatagattattcaagtcgttaaaacaatcacctgagccgcgatcggctagccgagttctacgatgaaaaccttcgcatgaccacggcacgaccacggcccaaacgaacgaaagcataccagatatggctggtacttgtacggatgatatcacgcttcttcgtcttcacttgaattttttttttgctggcaacggatgggtttttttggaggctgactcgcggaaatggatgaacacacatggtggtctgaggatggaaagctgtggctagatgtgagctgtctacgggcaatcctcgcagcctggacttcagagtcacttttcgactcatttcataggctgtcatgaattgcatttccgatccagaaatggactctacctctttttccatgcttttcgggttatctttacttgagacagtgtctaggggtatactgagagcttgcttttaatcagatgcctgcctctccagggccgatgttggaggtgtagaacaaatcaagtgggcccttcaatcgtggaacttgagcccctatgcagtttgtttcactgttcgttctgttggccaaccaacgacaatataaagcccacagtggctgtacaccgaagtatatatttgccgcaaacgtgtcagaactcactagtagtatataagtcaagttctcatcttgcctttgcaactttttgtcgcactatggggtcatgaaacgtgcgcgggctgatagaaattagtggagtcttaatttttactatagagaacgtcaaaagggcggagcacaaggatctagaattttatactatctacaagaatagtgggctcatgtctttgacaacgttggatttcgataatttgattcatttggcccaagacgaaatattagtcccaggtatgaaataacatcaatgcgagtgtcttattgaatgtcttcttggtgtctttctccccttttaggttataactagaagctaacctacagatcacgaaataattgcggtgaaaagctaaatttctatgcatcttgcgcatataatatgcatttgatatgacgagactggaaggaaatgttgggaaaagagggaaaacagataaaaacacactcagaaatcagaaaaattcagtttgagctgtttggatttcgtaggacagaacaaaaagccgtcactgaaaactatagaaggtagtttgtggtattgagaatataggcttagggtcttctgcaaggcacgcaggaacaatctcaaaggtccgatggtagtacctactaatgatagcggcatcctcatttagacctgggcttatgcctcggagctcgatgtcatgacataaatggcaggtgatcagacaaataggcatgacctcaccaaatcaatgccggatcatccggagatgatgacttcccaaacatgtttggtcgaatgattgaatattccacggatcgaaggacttctaaggtgtatttaaggttattggaggtaagatgactaaggtgatattggccagtcgctgactgcaatcctgaccaacacatccacttgagacaaatacaggacacaaagagcagatatccagacatgtctaatcgtcagacagtggagaaatgaatcgcttaagggccattgagttcaactggagtctctaccccacacattgccatgacatcgattgaactcaattccgagcccgtggccgattgggaaagattttacatattgtgatatggcaaggcacaaagcgatgaacgatgtcaagttagctaactgagtctacaggtattgaaccggaaattgcaaaataatgaagggttgctggctatccccatctcaactggagaatacaaaaacattagatacaaagagtgaatatctgcagtggacaccagctgttggaagatccacatattccaccttcttcctttggttaagcatcatcgacttctgatattatgctgtaccagatatcgatatccctattgctttttttggatcaagctgcgggccttggaatccaagcaaaggcatgggatggcccagctgaataccgagcaagctgttccctcatacgctcacttgtgcttggaacccactgctagatatgaacgccgtgtggatatcaccaaaataattccatgatgcaatgaagagaaggacggttgctaatattatttaggtccccccggggccctagttatagctcggtccattgttttatattccatttactattttcgaaagctgaacaaacacgactgaacgacaatacttgacttttatttttatttttactgtctacctattaataatttattgcaccaatttttgtcactcatcaacatgttcgccaaggccaagggaatcctcgataagagttcatccatccgtgatgaagttaacgaaggcaattaccatgccgccaaagacatcgtgaccaaaggtgaaaccaccaaagaatcgaccagccagggaaacaaggccaatgagatcgtcgataaaagctcatccgcccgcgatgaagtcaaccaaggcaattccaatggcgccaaggaagttctcacccaaggtcaaaacagcaaagaatcgtctggacggggagctgtcggcggggcatcaatcagtgctgctggaatgaacaatgaagaccttaacaaggggaatgttcaggagaccggaaagcaaggtaggaaaggacggatcggccaagacaacaccggtacctctactggcgaaacgaaggtggagcaacgagacattggcagcgagaagcaagaagttggccaggaacagcatgtcagcatcattacaaatgaagatactggctctaaacagcatggtcacagagacaatgtggcggccggagagcttgaacccaatgacgacatccgcaagggcccaatcacgatgccgggaaccttccaagaaaaggacttccacaatgcgaacggtaaagaaactatcgttcagagaggaaccaccagcgaagaaataccagacaacttttcttatgattccgcgggagcaggaagccaaaaaatgactggattagccgtcgctggaggtgaatctagcaaggaacctattgacaaagaggtccatgacaacgagaacatcagctcggacgtcctcaacgatgggaccactagcaaagacctcccaaagaaactcgtcgacgaaaatgttggaaaatatcatatcgacaaaaagcagcttgacaagcagggctctcagccttccgagaaggcagggacaagcgaagttgctgccaccgatgctgccggcgacggctatggtatgagcaagggagccgtcaaacagacctataccaccagaaagcagagcaagggacattccggctctagcaccaatgcagccacagcccaaggtcctatctccacaagctcaaagagtaacgttgcttctaccgtgggagaacatggccgtgcaagcggaaaaggggcggccgcctcaaaccagacgaacagcgggggttatacttatgcccgtgcggtatcaaatcaaggcttaactccgaaaaccccgacaagcacaggaaattccaccaccaatgaatccaaccaaacaagtggtctacgttctaccaccacgagccaaacaaataatgccttctacaatgccggcgccactggatcgaacaaagcaggcatcgtcggtggaggagttctaggacttcaccaagaaggtaattatggtatatccggcaatgacaacagcggagtcaatcaaggaagcattgctgcaggaggagggactcgccaggggggtgtctataatacctccggcaatgacagtttcagcaatagagtcacccacgccagctccggtaccaagagcagagccggaaatggggtgtcttcgaagcgcattgttacacagctgagtggttgtggctacaaactcactattcttcaagaaaaggttcaggctgtgtctcagaagtgcaagactcagctgggcctgtttcccagtgagatcagcaaacgcagccccaacgtagatgctttctttgatgccgtggcagctgaacgtctccgatggatgcctcatgatggtagcagactcgactgcagccttagatgggcgtctagactggcgtatgccgtcgacgctcttcgggagtccgtcggagtctttgcgcctgctgccaatgaggcggcaacgctcatctggggattctctgtcctccttttggaggttagtcaagttgaccggtgatatttattttagatatggatgctgactattgtacagtcagacatggacaatacggatgtcttcgagagcgtctttggccgatatggccgggtcgccgtcggtatatatttgcttttgcagtacgagattgcatacaaatcctcgcctgaacttcagccatatgttgccgcggtattcgcagatttgcttgaaatggtcagtagcacggctatgagctgtgtcgagggatttaaaagcaaagagtccgatcagattattggacgcaacgttgatgccgcctttttgacctacgccaagcgcttttctacccactggaattgtgttgtcgatgcccacactgcaaagctcgtggaggacagtcccttgatttactcttcgcctgagctgggtagcttgcgtcaattcctgggagtacaggaccgccctcttcagttcatcctcgactctcgcgctcactcgcttgctgagggatcgtttgagtggttcaacaacatgctctacgatttcagtgtcggaagctcacctgttatgctaatttccggtggtcctggctcgggaaagagtgcattagcccaatgggcggtcgaaagactacaggagtcgggtgaacacgatagctggaatgtgatcccctacaccattcgtgagttttacccttagatttttgctgatttgctagctaatctaatacaggtgctgatattcctgtcgctactttacctctacgcatcctgaagggtgtccttcaccagatgttggatcattctgtcagtgacaagcagacccaagaggctatcctggttgaagtcgcaagggcagcccaaggggcgatcgatggcgctggagatgacgcggtagaagcaagcctttggaagggtattcatgctggtcttgctacaaacatccagtacatgtttgtggttgacggcatcgaccagatcaggggtggtcataccaatgccattgcctgtcttgatcgcttctgtgagattctctccgaacagaatgctggatctaagatgattgctttcacccggcccctgagctcaaagaccgactccaaaggaattcagcagttttccatgcagacctcacagactaagagcgacctcatagcctatgtcgacaagatgcttgcatctagcgccaactttgacacacacaagggcaaccagcttcatgccgctgtgtctgccattgtagcccgctctcagggctctttcagttgggctgaaatggcggttgcatatgctaaacagcaaaagaccttgagccaggcggttgcctccattcagggcctgccgcagtcgatgccggagcttattgatttccactccaagagtcttgaccttagccagcagggtactattagtgttgtttcttggctcgcagcagctgagagacccttgctagtcgaggagattgagcatttgctgaacgtggatcccaagggccccagatactcctccaatcagccctctagtagctatgacatcttgaatgctctaagcccgctggttatgacccgtgatggtgtggtctctttctctcacacctgcattcgcgatcacatcatcaatcaggctaagtcgtctggtggggagtcccagctcagcatcaaggatgcacactacgacttgctcaccaggtgcctttcctgcgtccagttgagcgtgcgtgaggaggttgatatttccatggataggctgggtatcgaggagcgcaaccatcttttcgacaagtatgtcgtcttggagtacaccgcacgatactggctgtcacatcttctctcttcgccaattgtcaccgatgacgaagagttccaatttaattcaagattcaaaaagctcatgcctgccaccgttctgttcgcgcgcctcgagctgacttgccgcgagtcccaattcactcggtctagcgtcgtggagctgtacagacttgcgagtgacattcgacgattggtccttggcgagaaatcaatcgccctgctacaaagcctgattctcagcgcacgcgtgtccaagatggcgcatgccagccacgccgatgagacctgctacaaagcgtggaagctaagccaggagctcctcggccagtcacacccgattacaatggcatgctctgagatgatgatacagtcattctccgaacaaggcacgattgcctctcagcaggaagacatcctgaagtccttgatcttgacagattcggagatcacaggggttgaattcaatcaacgcctgaagtaccttggaatgatcgtcagcatgtacaagactcacgacgacaaccaatccgcgttgttcatctcaaagcacttctatcagcaagttcttcagaagtatggtaccaattcgcaccagtcatccgagacagcagatttcttgaccagtcagttctcgacaactggaagcgacgaggtgagccgtgacattgctagaaccaagtatgacaatatggtgcgcactatggaggtcactgacgagcgccgaatctcctacactcttcacatggccaagatgtatgaggaccagggtgaattggctcttgctcaggcagttctttcaagcctgtgggcgggtctcaactcacgcgacattgactcggttgatatgatggacaaaaagtctaatgtcgcccttgtgtactaccagttccttcgtcgtcaaggtcgaagtgatgaatctgaggtcataatccgtgaattggttgcagatctcgaggttactggtattcactccgaggagatgatgcagcgtgtgcaccttctccgcgctgagactcgggagatgcttatgtacaatctcgatcgctccttgtcaattcttatgtggcgctactacaaggagacccaccaagagtactcagaggaatcaaccgctctagcgctctcaattgctcagagcatggcaaatgcagtctctattgaggatgcatcctctctgtcttctcgggaccgcaagctgctaattgagctgctggacgtcatctcggccagtcccgacaatatgactgtcactaccttgatcctgtgccacaaccttgccagtatctatgtcagtgagggagattggacccaagctagtgaatgctcgatggcggttctgcggcatatctggcccaccattgaacagtccaaatctcaccagaagttctcgccagagcttgcaccccccgcggcagatttggctttggtgttggcctactgtcacttccgcaggctacatttagaacatgctgcagttatttatgagaatgcggtcggttctttgatctcttctgccggagttcccgtggcgtcggtgctagcagttgccaaggctgccgtcgagttccacgaaactacctatcagttcaacaaggcgctgaatttgctccatactatcagcaactacttggcagctcgtcttggagagaagcatgagcataccatcaacaatatgtatctcgaggctgctttggcaactcgtctggagaagaactccgaggccaagagcatctaccagcgaatcttcaaggctacttcccatcaggtcacgattgttcccgagggtatcgccgctgcaattgctctcatcagcctctacgataaagagatgcagtgggattctgctttgcatgtttaccgagctctttggccgaccctggttgttgaagacaacaaggcagattcctatgaccatgcgctagtggaccggatgttggagaagacttatttgggctatatgtctattttgaccaataaaagctccaacttctctgagcggtatcgggtggcctctgagtatgtaatgacctgtcgccacttacacggcgcaacaagtgagaagacgctcaatgccactttactccttgccgagctgtgtgagtcgagcgatgcacatgttgatcaagccatttcgctttacaagttgcctctggaaaccagcgagtgggtggctccttctcagtcatcgaaggggctagaccagatgacttcgtcgctgcctatcaccctcaagcacaagttggcacagctgtttgtgcgcaagcatgattcgactatagaagcccgttccctctacactgaagagtttcagctggccaagaagaatcagggctacttttccaccacgactctctcctggctccgtgaacttgccctcgcccattcgcgacaaggaacttcctcttctgtccagcagggtaacgccattctccacgcatactccaccgatgttttgcatgccgacggtgacactgacacagtgggtgactgggcccgccggatcgcaagtatctacctcgagtgcggattcattgaaggcggtaacaatctccttgacgaactccgccaccgcgtggtgtacagcttggaatcttcttccgcggtggatttgagcgatcgtcgcgatgccgtatttgttgctgccttcgaggaagtctttggcagacgtgccagctacgaccaaatcatgtctgagatggctcgtgagatgaagacctctagggacttctctaagagtctgtctggtcacgatttcattcccactttgatcattggccacaagctctacagtctccaggttggccagaagcgagttcgcgctgccaacgacaccaaggacaagttgtacgactacttctgctccaacctgtctgccaccaaggtggccgacaaggagatcgtgcagcagttctatcagatctgcctgcgtgaggtccacagagaaaactatagcatgaaaatcctcacaacgaccactaatctcgttcgtgacttgtgcaactcctcccgcttccaggaagctaccatattgacaggcgttttgcactccttcctgcatctgaccgatggtctcaacaaccaagaaagtatcaacaccgctattcagctctgcctgtacctgggcggccacaaggcaaccaagtgtaccgacgaaaagacctaccaagccatgtccatcaagtccaagctgctgctgcaagagatcatggcatcctcaaaatccatgggtatcgagatggtcgacctacccttcaaccaactcaacgacattatcacccttctaggccagcacgagatgttcgatgagctggaagccattctcacccaactctggacctcacgaatcgtccagcgtacctggacaccggatgtggtcgtgtggatcggccgacgtctagtcgaaacccgcttctgccgcggcaacgtcgagtccgccatccagttgtgccgcgacatctgctacaacctgcgccaggtgtggggcagctgcgacccggttacactgaacatgaccaagcttctttcagccctgttcacagcctcagagaaccaccagtctgcagcgactctacacgaaggaattctgtacgatctgctcagcgactccgaagcagagggccatgccaatgttgctgataccgcatcgcaacacatggagctactgcgccgtgcccaggcacgtctgggaccagactcaaaatcgaaccgggcttcggcgcatgcggaactgtcccaatcagttgccgatcgctttggtgtgcagtctgagcagatcaagaatgttggcgatgctaatggcggtgagcaattcggtgtttggtcgaagccgagacggtttagtatcgatgttgatgatatggaggaggagggccagacgcatcacaatcatctgcgtgagtccagcggtgttgggttgagtggtagtggcactcagagacgtatctcggtgcaggctctctaagtacactgggggatattttttttttatatcagatatttgtatttcagttcatgctggcgtttttggatgtttaacctgtaccaaattgtatacctttgtccgtttcaacatcacgatttggtaaatcacttgtctaactagttatcggcttcaataatctgactcttttagctcatcatatgtgatcatacaaaggttacactacactacagatgtatagtattgggatggcttaaatcggggcaatttctacgtagagtgggctggctactttatgaactggaggaaagatatttctaagtctaatacatcatctgcacaaggtacatacaatacccaagagtaataggtaattatgcttccaccacatcggtgattcgacacgcatagcagtttggttgataagaaatattgccaaaatgtacactgaccctgccggtctgtgtaggaccacaccgtgatgatgttgaatgaatgtagtttaaacccgaaacccaatatgtgtgttcatgcacgctagcacaaggaaaacaaaggatcatatgcctagtgtatgatgcaaatgatcaccagagccgaagcctggtcaagcggtcaatgcaaagctgaggcccatcaaccccatgcctccgacagcgaacccgatacccattccgcggtgatgggtgagcccaagtccctcgctgaaaagttgcaacgcaaccgaagtcatgactccggcggtgacggcaaacatacctccatatataccccacgagggaccagtggcatcgtcgctaccgcgttgcccagtgctccagatccagagcgctgcgagtccagcaccggctggttgactgatacctcctaggagactagaccagaacattgctctccagcgggaattgagggctagatagagcggaagtgacatggcgaagccctccacaatgttgtggataactagagccagaaatactgtcataccgagggttgggctggcgtggtttgtggcgtaagtaatgaacccctctggaagcttatgtagagcaatggcgagtgaggtttgaagcccaatggaaaggaatgcatttttaggaacgtgatggtggtgggggttgccgccggcagatttgggacgcccagaatcaatatcgtccaggtagctatgagattcgtcatggtgatgatgctcagaatgcggacgagatcgatgacttaaatgtgggtctaaaatgggagacgaagtggacgatcggtgcatgtcatgctgtacagagatgttgtcaaaatctctcccttccggagtgggaggcacatgttcaatgtcgtcaattcctacgcgagaaatttccgattccagcggcacggatataccttcacaatgcagcaagtttggtcgcgcgctctcatcgctgttgggtggtggaagcactttgttgcattcgaggccacaggtttgagaaaccccgaagcaaggcccgtcctcgtcacaggcggattttacgccacccatgaacgacgtaatgcggcgcgctagcattgcccgcatcgtgtcgcggcgtctgggtgccggctcgatgtgttggctcgcttgtactaccgctggcgttgacttgaatgaagatggcttattatgttgcaacaacggtgttcgttcggtatgtccatttgtatcgttgtggacatggtcctcgtgtgcggcctcgccgcgctcggcatcattttctgactcgtcatgggtatgggcacagtcgacaacatgagatgggatgtaacgatgtgcgaacgcggatagtatttgaatgccggccactccagcaatgaaaagaccgatcaacatatatgcagatacagcgggagagaagccggcgcgggtaaggtactgcttggatgtgggaagcatgctgtagagggaggtaaagagctgcctaggattaatatagttcactattcctccagaataatgcttaccatgactccagcactgagacataatgatgccgacaggaaatgactactgttggcgatctggaagctcttgcggcgggagaccacttgaaccagcacatcgacgcagatgatagaggaaccaaggacgcatgctgaagatagttagtggctaatatttcaaagactccaggcgacacttaccgacgcctgagacggtgctcatcacccatccccgaaggtcgttggcagacatggcgtggggagttgaagaaaacggaaacggtgatgtaattagcaatcagcgtggttggcggtcaagactttgcctctcttcctcactctagaggaatgaaaatatgacgatattcatgatgggcatttatgttaatcacttgcgttgtctgaggacagtgcattccgtccccaaggttctcactgcacctctgcaagcccccctcatggctgggatctgcgatatcgaacaaacgatctggcatcgtgaacgtccagtttgagagtccctaggactatgggatatggaggaatatttcctatctgagggtcatagatactgcctttcattgcaatctgtcctgtgatacttgacactttctcatatgaaggtgcacacctggacatatgcaggggattatgcaactgacagtatctggtgatttgaaataactttagactcaccggactcaagagaatgacaagtatcacgagaggcaagagaacccagagaacccaggaaatccagagaatatatatacgacatctcccatgccttggaaatgacaatagttccgggccccatgtgatgtgattggcccgtgactccccatcttttttgctgtcttcgtgtttcggctctctcgacgctctagcctctcagctctacctaggtaaatccaaggggcactcagccatgtccaaagcaaccctggccgtcatcgctgccgccagcgcagctaccggagctggtgtcaccgcgctgctcttctccggcaaatcctcgaagccccaacaacaagagaccctctctccgacaccgacaaacccgggcctcaaggtaccctcaaccatccaggccccagccctggcatccaagcgagccatcggccccgtcgacccagcaggaatcctccagtatggtttcccgggcccaatcgccgacgagctctcttccctcccattgcacggcgcctacgaccgacgcacacgcaacccatcttgggtcgcggaacacatcacgccagaatccctagggattaacaacgccgacagaaagaagagtaccttcttcgaggacacgaccatcccggggatgttccgcgctaagctgtccgactatttccgctcgggctatgaccgtggacaccaggtgccggccgcagacgcgaagtggtcacaggaggcaatggacggcacgttcgcactgagcaatatgtgtccgcaggtcggcgagggcttcaaccgcgactactgggcgcattttgagactttctgccgtgatctcgccaagcgttatccctctgttcgcatcgttactggccccctgtacctgcctcaccgtgacccggatggaaagtggcgcgttaactacgaggttatcggcaacccgcctaacgtcgctgtgcccacacacttctataaggttatctacgccgaggatggcaccaactcgcccacgagcaaggttgcactcggtgcttttgtcctgcctaatgctcgcattgcaaatgataagcgtctgactgactttgaggttcctctcgaggctgttgagcgtgcttccggtttggagttcggctctaagttggacctcagtcgtcgtcgccgcttgtgtcaagaggtggcttgctcgatcactgtgcgcgagttcaacaatgctaagaagcgttcttgagcttgatgtcacagaaatgtgaggagagagaccaggcttgccttttgacttctcgtatggcttcactgtattctagaaacattgtatttgcataattcgggcgttaataaccgctccgggcggcaatataaggatctttctttatcgtacacataatggaaacctgtgatgtttcatgtttctttctcgcttccttttattacgaagttgttcagcactggaacgcaaccccggtcttcttccccatgctcccacctttgctagcaaacccagtcccctcggaggagatctccaccagaccaggctgaatagcatccctatcctttttcttagacttcttgttattcccattcccgtgatctggttgtgacttcgccgtaagatctgtctcacagacgaaacataaaacctgaccatggagagctgcagtcttctcctgctcctctttcgaggcatgtggatcagggatgtggtgttcgtggggggtcatgaatttcgttacacacggagagcaaatgacatgcccgcagggctttgtgactgtcatgagacataattagcaaaacccaatggctgtaccaacttctactccacatacgcatcgctttgagcccattgcttaaatttttcgtgcaactcggacacaccctagacacagtcccatcggaagccttctcctccgtgaaattaacctcaacaagcgacttgagcgagtagctatgtcggctctcatccgtcgagccaggacagacaggcgtcaacttgacggtcttgttggcggtgatttcattcgcatcagtgttgggtgttaaagatggaacccagaaagacgggagagcagatttgctagccgactagagcaaatttgttagttcaaaacaaatctccaatcgaagaccgaggcttcaagcttcaagctccagcccaaagaatgaccacaaaccttctccatcttcaactccatcctcaacctctccttctcctccccagcaacacgagccatctcctcctccccgagctcaaaaaccctcttcctcttcccatcaacctcaacctccctagccttgaacttctccaaagcctcagactcctccgccttgcgcttcttcccacctttattctctaaacccatggaaacaagctcgaaatccctgagatctctctccttcatctccgccagcgagcgctcctcatcctctgcgatgcgttttctcgcctcgtcgcgctctttttcaagccgcttgatctcctgccgttgagagaggaggtcgttgatcgcacattcgcggcagaagaggtcgccgttactggcgcatgcgactacaggcgcccgcgcgggttgcagacatagacggcaggagccaaagcttaggaagctgtcgcggccgattgcgctgcgttttgtgccccaggttgagcgtagaagaccgcgttcgtaggaggtaaagtgtgggagggaggtgtttcgctttgaatgcgccattttgagtgtggatcgcgtggacgttgatcgggggtgagggtggctttttgtagcttcttggatggcgtaatacgcttttactcggggttcggcggcggtggggcttgggattggtgtgttggttcaccgctcagcttaccgctctcatcagccctatgcaacatcgtcggactccactacattgtgtatctaagcttgcacagacactgttgaaagcaaaatatcaaataatcattgtcaatcgtaattcgcttttgtctatcggtgattccacagcctcactcgaaagaagcatgattgaaatgaaatagccaagccatgagatatcaaagcacgcccatgaatgcagcctgccatacagatctgattcaacgatctgacagtaaatgaaaaattcccagaagcctaaacgtagacgcggacgcagaaatatgctcaaaaaccagaccgaaccgaaagcctgccacgaaaccgagattcaccatatgttaatgcaaggacagtaaggaaagtcaattaggaaaaggcaaagtgagatgcatgagtttgaaaaggggtataataatcgtcaagcagaagatcaagatgagaatggtcaggatatacagaagaaaggagaaaaagataggaggcgtagagtcaggcgcctacggcctgctcgcgtatgttttcgctggacgggctatcaatgattcgctcattgatagatgtagaggagggggagggggagggggagccgtcatgtcttggtgcggaaagatggccgtatattgtggatgaaggagagcaatgagtatgttcggtgtctaggggatctggggtcgggaacgaggtgatcaccggggaagccgggctcccaaagtcctcttccggttgctcttccggttgctcgtccggttgctcttcatgcgcatccttgaactccgccagatcgtcgctggtacgcccacttaggccagtggcgttgctcgtcctgcgcgccgaatgacgttcggggctgcggtcggtcataatcgactcgccgtccaatatagcaggatccgacgcccgtggctcttcatgaggggtgggcttgcggagcttgaggcgctcctccgggggcatgttttgccattcagacccgaatgtgacgacggatgctttcttgccatgcacggtgaaactaggggctttgcgaggaaggacttctccatcgccggacaattgatcgtcctcctcctgtccaatgctagacactgaaccccgtttcttcttcgaatgagaatggtttctatgagcatgcgaatcacggagggtgcgatgaaggctgcgacggacacgactcggtcgatcgctcttgtcgtgtggatgtgtctcgccctcggtgtctttaccgggaagtgcgtcaggggcgatctcttcattcttatgtgccgacggggacgccggcagctccagaagaccagcttctcttagaacacgctcctcgccgtcatcaaagcccacaggggatgtcagtttcgatgtacgagaagccagactagctccatcccaccggctggcacggctgaggagcgaggcttcacgctcgagtttaatggtcgatggatcgggggagtatgacttggcacgttcgggtacagccacagcagagcgccgacgcccgacacgggcaatgtcagctgaagtggcagatcctgggatactgggacgacgcagttcgtcattcgaaggtttagccagcagtccagcctccgagggctgctcggtttgtgccacatgaggctcggggacatcggcgctagagacgttttgcacaatactaccggctctttccacgctaggctcagatgtcacggacggcccggaaggagaggccaggcgtgctccgtccgactgggattgcgtcggttcagagaccgacccgaccctactttcctctgtctcttcatcctctcctaagtctcgcagaagaacctggcggtaacatttgctacgccagatatcctgtctcacccatttgatcttggcagacaggcggcctgcagccatgatgacgccctcacgggcccgagcgtgaagaggagtgagcacttgcaagtgtcgggcattttgtaaaagatcatccagttgcttttgtgacacggcgagcttttcgtttctttcccggattttttggctcatcaattggcgccgcgcagcaacaaattcggcaacaacgtcagtatcgatgctaggagaagggggctctatgtccgtcgactgttgagacttttgtgaagatatcgagcgtaatcgctgactcttgcggtatcgctgcccctcataattcgtggcgatcatgcccgtggtgcgcacaccagtggtcctgaaggctgccgcgtagttgaggtgtgcaagccagtcattcatctcaggctcagagctggcaaggaatatctcctccaacgcgttgtgtcgaacaaagataaaggcatgcttatgctttttataacttgagtctaggagggcaactgtgtcaccagtagacacaatgttgtccggcttgaattcagcaaggggcgggttgaagacaagagtcccttgacggccattcttaacatatgcctcctgctgtgccatgagtgagcgcacccagttcacattgcggaagaagtagagttgagagaaggtgagaatgaccccccattcctgccagggcgacctggcctttttcttctttgggtgtttccgccaaagcaagccgaccttggcgaccttgatatctaccagaccgggatttgagtcgcgtgggctatctaagctagccggcatgaacgcgtcaggacgagagcgcagagaaataatctgcaagattccagacttggtgaaggcctggtgaagagcatctatgtcgggtgggccagcggttccaaaatgattgtatgtatcatccagatccatgacatccttcaagctgggccgcagagatcctaatttaccttccaggataagtgagtaggggtcgacaggttcccgtgcaatgcgggccaaattttcggagctagttgttttgaacagagtgcgacgtggtttcgccaagtgtcgatcagggagattggcgtcttcgacgcgaatgaacggagtgtatgagatattctcatagaaacactcaagaatatcgtctgatattccttcactgcgacttatcttgacataatccgccttctgcatcttccgtttgttgttcttattaaagacatccgtgtgaagaatcaaaagcgagaatgcaataaagtatgcgttatccggggatgtgaagatgccaggattacattcgtgatagcgatcagcaaaggcttgcacgaaacgatcaatctgctgtgtttctttcggaagctcgacttccatcaaaagtttgcggattgccatgtcgagtgggtcaccgaagtatgagaaggttctcatatgttttcggagacacaccttgtagaattcctcgtctgattgagcgaggacacccgcaatcatgccccggggcagagtttcttctaaacgtgtcagatatgaagcgggtgtgtcgttttcttcccgttttgggattgctagctcttgctttacgggggtggaggcaccacctatcgtgggcgaaccatgatgaggagaaggtggtgatgagttttgcctcaatcgctgcgtgatattaaagatgtcaccgaaactcttgcggccactggtcgaagtggacgtgcgcgccgaagatgccaaatatggaggtatggacaagtcgtcttggttctcggccagcgatcccatggtagacgaacgtccccggttcttaaaagaggggttagaccgaactgagcgagcggaattcgtcgaatcatttcgaaatagcggtggtacatttgaggaggcaacgaatcccacggtggaacgagctggcgaaggtagtggtgaaacttggtcctggccatctgaaggctcggattttggggtatctgctggggggaactttggtcgaccatccacacctccggccggctgcgagactttggggggtaaaggaaagagaggagtccgggatcgtgtcaagcgtggcatacggaatcgctttgcggtagtgacgggttgaacatcacgaggggaaatgcttggggtgactgtctggtcaccgtagctctggtctgatcgagacgattcggaaaaccggggatcgatcaccgacgagcgctgggagtcgttgggctgtgtggtcccgccccgtgagttggttgacaagcgccctggctcttctgtaatgctctgggacatggcaagcgtcgagtcggtaacctgggagtcggttgatccttgacctcttctacgaggcttcgcaggttgttccattgatttccgagacatttcctccatggactgttttcttgacgacggtcgaaagctgagcttgggtctctgtttcaccggttggtcgagctcgtgactagtcggggcggtagtgataattttaggagctttattcggtagacatagttaatcaattgatcctgatgagcattgagttgtgcatgttttcactcacgaggtagggaagggaccgggggagtttcctcgcccgctttggcgtaagacttggagagctggggatcagaagcatggcgtagtctcatgaagctgaatcgcttgtggcgtaagttgggacggtcccccgaggatggtcctgcaaagtccgactgagatacctcatgggtcgacccgttctcgtccggtacctgcagtcctggatctacttcttctgacaagccgggcgagcgaggaattgactcggatagtctaggttcggcgggggggtagggacgaggaaggtgttcactgcgacgggataggccttgaggatccatggtgctctgcctcttgccatcggccacaagacgcagtcctttccaatgcatggtgaagggcagagcgtgaggacaaacccaagctaataatccatggaatgtaatatgttagatggggaattgaaatagaaacggaggacattgcccaggtggatccagacgcggtggaggtccctcgcaaaaaggggaatgccggaaagggaaacgttctagatttcttgtttctgcccgccacgcgtattttccttttccttttcctttttttggatcttcgcacaaaaatagatagaatcaaaaattagaagaagagagagaaaaaaaatagaggggcaaggcagacgagttagaatctaggcctgagcgtcgggtaattgaccgggtttaagtatagagatggacggcgtagaagatagaaggttgccgttgacgtttattcagggttgttagcttctatttaaatcgtacagatcagatagattaaaggatctttaattagtagtcgaatcattctattcctatggggtatagttggagtacattaggtactaataccaagtcctgctatcactaaaagtgccactgacgtagaacacaaatatcgcgaggcctttcttctttttctccggatgtctatgggccagagaatttcttgctttgcattctattccaactgcttttgatgcattgaacttggactatatctgccatcgttatctcccccaacgctttttccccgccctcttctctcttctccgcatccaggctctcacagatatccctgtgaacctcaggtctgacttgggaccaccaactccccttcctccactggttcttgcgactcggcatgcgtcttttatctcccatattggtcgcgtcgaccttgcttcctcttatctccgctgtccccgctggttcaagcatcaccccaccgccacccctgctgccttcccacctcactcaatccaacccacgcccatgggctcgactccgtgactgggtaattggctcaatatgggatattgatcacaaacggtgcccttcaaaatactcgtcaccaccgtcagatattcacgatcggtatggcagtgatgtcgtcctccgctttcatctgcgccagccagacgaggcagaagcattggctgccgcctcgcaggtgctgttcttggatatttgggcaataacctccaagttcgtagatattagacttgcagatgatatggtgaacttttcttctgaccgatttatgattgtttcgctaattattttgttagatcccttccttgttggacatactacctttaacactccgcacctcctacactcccctcatcgacaacctcgccgacgagatatacgcctcttacccctcccgccaccgtaccgactcagacttcagttcaggaattgcatcgggtgaactgaagacgatatcgaacggcgacctattcttccaagaataccagccgctctccgtcattacgcagtggatgcgcttgatggcatcgatgttctccacgcacgtacgtatggctagcgtgggcctcagctacgagggtcgcgatattccagcattgcgactcggcgcttctcccgacacagaagccacatcgggccctcgcaaaacaatcgttatcgtcggcggttctcatgccagggaatggatcagtacctccacggtaacatatgtcgcatacagcctcatcactcattacggctattcacccgcagtaacacggctgctacacgagtacgactggatattaatcccaaccctcaatcccgacggatacgtgtattcatgggagtcagaccgtctatggcgtaagaaccgccagccaacggggcttccactgtgccctggcgttgatctagaccgcgcctgggactatgagtgggacggcgagtcgactcgctcgaacccatgttcagaaaactacgccggagcggagcctttcgaagcacttgaatctcaccgcttggcgcagtgggctcagaacgagacggcgcatggccgtgctgagatcgtaggcttcgtcgacttacactcctactcccagcagattctatacccttactcgtactcctgctcatccgtgccccccaccctcgagactctcgaggagctagcgttgggtctagccaaggcaatccgccagacctcccatgaatcatatgacgttacttcagcgtgcgagggaattctcagtcaaggtacggctgctgggattacctcgggtggcagcgcattggattggttctaccataagctgcacgccacgttctcgtaccagatcaaactccgcgaccgtggtagttacggattccttttgccttcggagcacattgttccaacgggcaaggagatattccatgctatgttgacattcggcaagtttctccgaggcgacgaagcgtcggatatcagctttgaggacttgatggcggatcaaatacctataggcgacagcctgtaaggttttttttcttttgatgattgcatgttgactttacgagcggatcttccccttcaacctctgtacttctggtgttgcagagtctttgtacagtatgtaggctatttgagcctaagaatgtaaagaattcgaaacattcctcaatgtaccggtaggcttggatgtgacatgattctaagaaaacaaccactgtatccgaacttccatactaagcaaggtttcaaggatttatgtatcctatcaataagcaggaatcttacgggagcttccaaatgaaaaagaatatatagtttttcgttgctatcctcacagaatatgcgcccagagttacgactaaagtggactagttccagctaagaaaaatcttggcctaaaaaaggtgctcgcggtcataggtcacttttttttactagaggatgctagccctctatattaattcgtacatacatatcaatatactattgatggctacgtttcttgaaccaagggtaaaaggataatagaccgaaaattatctctcataatcaaaatatatgaaggtaaagcaagatattaaaggtctgtcgatgtggaagatgacgggacaaatcgtgctcaagtcccacagcaacaagatatgtgggtaggacgcgcatcagaaaagccaagacacgaatttcttatagaaccagcttgcgtcgttgttcctctctgcctcggcctccttcgcggcgagatacaacgcctcttcgcgatcaatctcgtctttgccagtaaagagatcggctgtcatggggtcaacacctttggagccggtcgcgaacttgtatccgaagatcataatgaggtatagagggataccgaggtaggcggtaatgaagttcttgtaatcgaagtctccatatgttttggggttgtggatgaagacgtcgaagttcttagtgaaagcgatgaggatgcagaatcccagagcaaagtatgagcctgcgatgcccaagggcgccttgtaggccaaactttcctcagggatgccctgggctttgcgtgcacgcacgaagtagatgtgagtgaccaggatggagatccatgtgaggagaccgaagatggtgacaaggttcacgaagtacttgaacacagtcctggagtcgctgctaacgttcatgtagcccagcaaggcaatcacagatgagatagccagtgcaggcacggggacgccacggcggtcggtgcgggcgaagatcttgggggccttgccttcgcgggccaggccatagatcgtacgggtggcgatgtacaaatccgagttggctgctgagaagacaaagagcagaatacaagcgttcaggatgtggggcaggattgggatggcggccagctcgatggcgaccacaaaaggtgaagctgcagctgagccctttgccttgttatcgtctgaaagggcgaagaggaggctcggggagttgtacggaactagtgtgccgacgagaagcacactcgtcacgtagaacaccaggattcggtagaaggtcaatttgatcgcgcgagggatcgtcttgcgggggttttgtgcctctcctaccgtcactccgactagctcagtaccgaggtaggcgaatgtagcggacaccatcgtggaccagaaagccaagaaccgaccaggtgctccatccatcttataggtgttgaaagcacccgggctcttccagtagcggaagcccttacggtcatggtccggtccaccaccaagcatgagaataaaggataggaggatgatgccgaggataacaatgaccttgaatgaggaaagccagaactcaaattcaccgaagaatttcacaccgaaataattgatggcaacgacaattaccaggaagatggtgatccatactccagcgttcacctgctctgtgggtatccagaatgatataaccaatgcaccggcagtcatttgatttggtgatagaatgatatatttgaaccagtatctagattcgggtttcgtgttagcgagattaatttttataggaatgagtagtacatacgtccaaccgagggtgaagccaagcgcagggtcaacaaatcggacagcgtaaccagtgaaaccagagggcaatggcagccaagccgccatctccccaagagcacacatgaccaggaaaacgatgaaaccaacccaagcataagaaataagaattgcaccgggctattcaagtcagcaagaaggttcgggggtcaatttcggtttcaacactcacgccagccctgtacgacatctggttagccttggatctcagaacaaaatgggtagggaaaacaatcacttactttgcaagagcttcaccggttccgatgatcaagcccgtaccaatagcaccaccgatggctgtttactgtcaacgaatgctcgtgtccgactcagaacgacacccaccaatcatagtaatatgtctcgccttaagcgcacgatgcagctcaacatggttgggatcgttcaggccactctgaccaccttgctcaatcttgatatcctcactgatctcccttgtgagggtattgtccggatattcatcgactttggtagacttctccattgtggattcgacgcgcagaggtttgcgctgacgaggaaaaatgcccgggtaagaggtaagagtaatcccagatgtaagaccaggaagacagggggggaggaggaattaaatggaaagccaagagtagaaagtacacagccctggagaaagataagcaagagtaaaaagcaagttactgcttagttagtgacaggaaacacaaataataagatacgagacccgagaagacctcgggattaagatagccaagggtttttgtggctttacggggtaagatattaatttacccaaacacctcatatcacctgcacagttcattccggtgatctgatagtttggccattttcgggttccggggagtactggcacaatacggctgtgcgcatgacgtagcgctgtgctgttgatctagtatatgtatagattacttcccctgtatcgaatatgtcttccgtcagtaaactccgtatactataccagatattgttccaaaaggaacacccgggcaaagcggagaccttggcgtcaagacgggatactataggctctgcgggggcgcgctttgcggcggcattcgtcggaaatttttaggttgccccattccccccgttcccccgggttttgatatgaagcttcttgtttacacttagtattcaatataagtatgagaataacacatgttcaactgtatttacagagttgatgtcgatccaaaagcaaagagagtaagctccctcgaggccagacccggccatatttttgactcagccacccgattgatagcctcattttacgacaagggcccttatcaagcgcaaacccgaacggactgtacagccatccattgccaaggcggaattccattttcgtccatgaaaactaaactcgacctgggtgagatgcacgttcttgagcctgggcatctgcgccaaggccatttgcgtatggttcagccaatccttatctctcttggccagtgccccgtggcccggtcttaaatttatggcgggattttttggtgaaggtagatgcggaatatttctagaaagattctggattgtggcgggggcctggtggaataatttacccggtggctttggcgtcgaggctgcgcaacacaaagcaaatatgagggggtggggtgccacagcatggagttttctaaccctatctacaaaggatatctcgtacaacatacataatccatagtttcgctggatatgtccatcttcttggcttcttcgattctttgttcggggtatgtgtcaacaaattgtaatactgcttatctcgtgcttgttcctgctgtaacagtggagatgcccagcctagatagcaaatgtttcaatcccgtcacctttttatactttctcatgtaccagtaaatgctcaaatgcgcatcgctctgagacaaggtctgacagaggagagaaacaccaaggctagtatcgaagttggaacggtgttaggaagaaagcctgggacagctccccttgctggatttctggcatcgcaatgtgaacaaatcgaagaatataggaaattggcgagtcatcgttgatggatgtctgaagtccacataagacattctcgctttctggtgtggatttggctgtgacgagcattctcttgatctcacgaggccttgaagatacatggctggtctttcagctcagtgagcaatccaaaggaccaaggttttgggacaaatggtcatagagatggtgtcccaagtctgcaatgtgaggtcccagagatacaggatcttaagtaaaaagccatgacgtggaagtaaaccgtatagggatgtggttgatagcctagacgaagaaagaatacaaaggtattcagattccagaattgaacgaatagtaagagtgtaaaaaatgttgagcggtgtgatacattagctagtataaaatgggaaactgacaatatataatcgagtcggggcctacccagggatccagataatgcgaaagatttcagtaaacagaaaatcgcgcttgctaatattccatccggggtaatcaagcaaatcaagctcaattcaggtaatggtgattgatctagagcatgcatagctgacgtggaagacgatggcccataactagccaacacatccacagcccaatcatgcaatagtcgaggtcacaccgacccaggaaaggaggctctttgtggcaatcgggcaggattcagcctcatgaaaatacccgaagacaggaagctaccggttagatcggttatccattcgtccagaatcaagaatcacagatgtaggttgcaacccacagcgcttcaatgcattactagtgacgtggctttggagaagcggaattttgtttcctcgtaaagaaccacatttgagggggtgtgtggccaatatgcaggtctagcctagttgggttgagggaagaataccacgcacatgtgaaattcagccgctttgttccctagtaggagtgaccttggagcggttggacttgaccgagtggattgctcgtattttttcaactacaacgtaggtggcaccaccgaataatggcgacccctgtggttagacagggtacagttcatgctgtacgatgtgattgaggagaactgagccagtcaatatctcatcatatccgctgttacttcaaaactactgcaagccaccgtttaccaaagtccctgcaaacacgcctgaagctagcagctggggatattctcagcctgtcgatcaaaggcaacgttaccaacagcctgggtgttgggaatgtgatcaagtcattccggtgggggccatttggtctgcaaatctaattccttgaaagtgtgctgtggcgtgcataagtccgttagggcagtggtcgttcattgggtggtgaacgcctcagcggttacagatatttatatttttttatcgtgctgatcggacgattttgattcgtcgaaggaaagtggaatttactatcattagaaatactgaatagtagttaatttgacggttttccatgttaagacttgaagagatgcggggggaattgattccttctcctgagctggtccctatatcagggtctggcagccgagcatctggattcttcaacttccagatcttcaaccaaagaaagttcttaaattccttgtcaatcacatcatgggtgccatgcgtctcccccgcccaatgggcatctatgtccccagttcaccaagaaccctcaccggcgacatgatctctccaccactctctccagaattcagcttcgattccgagactgtcacaccctctctaatcccagctctggaatacatctctgccaaactacaacaaagattgatgcacgtcaccctcctcatcggccgcggaaagccctacccgaccggtcaagcctccgacttgatgatcatcccaatccattcaatcgagccacaagcatggcgagtacttgaacgcgccattgccaaaggctcgaggaagttctcactcggccctagctggaccgacgccctcagccgcagccagtatgagcgccaggctaacgatcacctcgtcaagcaatccattctgcagaacgaagtcatcttcagtcaggagggcctaactctcctaaacatggaccgcatctataccttcaagcgccgtatgtgcattctctctactcgaccgttctcctgcaacggcggacagtcaatgtcatcctgcgttcggctactccaccgcatcgtcgcagatttcgccggtcgccccttcagcaaggctttcttctaccgcgtctatgagcagctcgatgtcccagacgagcagctcactgccgtcgcagttgcttataaaaacgtccacaaccaagatgcaatcattcttcccgtccaggcaaaagctcctgctcctgcccttactactgcttctactgctcctagtactgctgctgctcttgtttctgttccggttcctgcttctgtttctgctccagttcaggccaaagtcgaggccactattccagcgaaagttacagcgaaggtccagcccaaagtgcaggcagaagttcaagcaaaagctcagctaaaagctgccgagcgagtcatcttgaaacccaagaccgaccctatccctatccgggtaagagccgaacgtccccgtgaagtcaaaagatcgcccatccagactgtgcgcggtcggagacagcctccatcgtcgaggatgcgagggcacaataagcgtggacctaagacgcctctttctgcgtcggatgttactcccatcacgcggaatgagtggaatattcttgtcagccaggatattcgtgtgcagcctaaggttacacagtggactccgtcgccgaatgtcttggccgctgcttgaaccggatttccagttctgttggtgcacagaacaattcgctgttagatccatgataaaccgccagaccgttgggtctcactcacggctcacatgccatcccccaggcgtattggggcttgcttgaggtggaatatagatacatatacgagaaccaaatctagcccatggtgctgggtcatctctgtgtcttccccatacctgattccaccgatactggacctttataggccattttggtggaggacagattggccagtcttgacataccgggcacaaaaacgagttcaggactggcgctgaaaattgctcggtaccctacgatgatatgataatgatttcgaacattttcaaacgcttttaatgacggattggagtcttgaatattgaaaatcaattcacagtgtacggagtatatagttctctttttggaagacatacaaaacttttaatgaaatcgggcaatatcccaaatacatattcaagtagaattatgaccatccaagaatctcaaaaataatcaaatcatacaccttattagatgctgtgatgaatcggcatcctccgggctagtttgtcgagcagccagcatggccccgcttaagctcggcgaccggcgaactgagacagctacccacccaatcacaggcacgggaaaagatttacagtggatgtcaaacaccaaaattcaagtattgaagctattagcacatgggaatgcaagctgtgaataatccaagacatttcctatcggcggaactcgccgctattgtactatagcacacaacactgttggcgttttggatgggattgtagacattcatactgaaatcctgagcactccgggattcgcgcagatcttgcagaatcctacatgtacacatacacgaaggggaggttgtctgaaagatgtcggcttggcggaatcgggcttggcggggttatctaaagtttaagcgcgggcatatagccctggaggaacccctcttcggtgtttccaacgtcaattgaagcttttggatatctctccaagagacattgtagacatcgtgacagaaatttagtctgatatccaccatgtcggaattcaatgagcccgcagatacagactcacgcagtctagacagcgaccgcaaatggagtctgcagcctcttcttcgaagtgccgagcgctcgcatagcaaaatgccgggcattaggaagattcctcttcccgccattggaattattgcatttattgcgttgttgaatatcatagtctggattgcggcagctattgtgctggtaagttcgaataggttgtttgacattggatggatttgctaatgctttctagagttaccatccgtgagtcttcattactggatgtcccatagctcaaatctcatttcatttactaattgagcggaatacagttcgctggtttctacagctgccctagcctattcgcttggattaagacatgcattcgatgcagaccacatatcggtatgtcgaagtcggcctggaaatagaccgaatgattaacagtgagatctataggctatcgatttgatgaccagaagactcctggcaacaggacaaaagcccgttaccgtgggcacgttcttctcgcttggtcactcaacgtgagtacagtcacctcattctatatcaaatcaaacctgacccagtctagcatcgtgattatcacatcagttgtcgtcgcagccacagcagcagctgtctccgaccgcttcgacggcttcagcacggtcggtggaatcattggcacctccgtcagcgctgccttcctgatcctgcttggtcttatgaatgcgtatatcctgtataaactcgtgaagcagatgcaaaaggtcttcggtctccccgagggccatgaagatgaagcgtggaagatcgagggtggtggaatccttttctcggttttgaagaaaatgttcaagctgattgatcggtatgttttttggtcaagctgttgatgctccgcattatctgacaaatgtgtctattttttgtctagtccgtggaagatgtatcccctcgggattcttttcggtcttggcttcgacacctcctccgagatcgctctacttggaatctcatccatcgaagccgcgaagggaacatccttctgggtgattctcattctaccggctttattcacaggtcagtaccctcacatgcaagctcatcaatcccctgcttcagctctaaccaatgtctcccagccggtatgtgtcttctcgacacaattgacggagccttgatgttcgccctctacatccaaccagcgaccaacttcctccctcaaaagccaacaagcactgtctcagacacctcatcaatagctaccgatccagaccagctcccgcaatcacataacaaccaccgcgacccagtcgcattcctgtactactcaatcgtgctaaccacactcactgtcatcgtggcgattgtgattggcgtgatccagctgctcagtctcatcttgaatgttacagacgccaaaggcaaattctgggacggcgtccaggtcgctggtgactactatgatgctattggcggtggtatctgcggttgctttattgtctttggtctgttgagcgttctagtttataaaccatggcgcaggtggatggatcagcgacatgggaaacatgtcgttaatgacatcgagaggtatagagatgacgatgattctccgggggatgctcccggttgtggtatcattgtgactgagaaccccagcggtactgctactgaggtttctgggaagggggcttcgtctcgggttgctattaaggagactggtgagccgagacttgaagaccacatcgtgtaggcgttgctacatcctagctagtataagccagttgctattcttcgaaggcaagtgttttaatatccatatatcctccgtcgtgtagaagtaagcatcttccaatggaaaatgaataccaccaaaagtttaaggtgcacgaggctctgcgggtttaccctagctccttcccttctggtcaaaaatcgtcacccaccctagttcctccttgaccttaagccactggacaggtataaataccccctccccctccccccccnnnnnnnnnnnnnnnnnnnnnnnnnnnnnnnnnnnnnnnnnnnnnnnnnnnnnnnnnnnnnnnnnnnnnnnnnnnnnnnnnnnnnnnnnnnnnnnnnnnnnnnnnnnnnnnnnnnnnnnnnnnnnnnnnnnnnnnnnnnnnnnnnnnnnnnnnnnnnnnnnnnnnnnnnnnnnnnnnnnnnnnnnnnnnnnnnnnnnnnnnnnnnnnnnnnnnnnnnnnnnnnnnnnnnnnnnnnnnnnnnnnnnnnnnnnnnnnnnnnnnnnnnnnnnnnnnnnnnnnnnnnnnnnnnnnncatttctctcttttcttctttcttcctccttcacatctctgggtctgtctctacttccacttttcaaggtttcatcctccaccatggtcaccctccatccacctttccaccttgatccatcatcgaacatgacttgataccactatggaccttccaacttggtcgccttccactaggtcactgtcattgtgatcccatccatcatggaccctcttggtcatccatcaatccaacatgactttgaactatttgcatttcttgtgacatctatctatccattgaaaggcgaaccttgctaactcgtttttagaaacctccccaccccctccccctcacttcattatgaccaagtgaccatccagcaactagaaaccgttccgggcgacaggcttgcagtgaaagcactccggccggtagtttaaatgctacttactgcaagtttccagcaactgggcgtggcctcgcaaagcgactcagtcgacacgcttatggtggaagcactccggccggtagtttaaatgctacccaccataagttgcctcggggcaaaccgacaaccgggcgtggcttcgcaaagcgactcggacggcaacagcttcttgtcagctattataaacacaattcgattatggtcaataacctctttttacccctcatgttccccttcccttcaatcactaccttcttcgatcaccatgttctccatcagcccccgcgtcaatgctcgtgctcaaacctacaactggcttcatcaattttcttggtcaaactacgtctcgtcggtgtctacctcatattccgtgccaacaaccatcaatgcggcgtctgatcctttctatctcaatgccaatggcaaccaaaacatcgattaccatttcggtcccgaagctacttcaaacaacaagaagcccaggtcaaagcatcattgcttgttccaaatcccagtggctcggtttacaaatgatcattctctccagccaaagaccaaaagccaactgccacatatccactacaggctcggctgatattcaggatgcacataaaattggactcctcgggatttatatatatgcgcagcagggtttgacgtgggggctactaattttcctacattttcgcattcttttgccaggttccaaagtcgttggggtgtgttcgcaaaaaagaaaaacattccatgtctcatacataccaccatagtattcttgttctcacaggacacttcatgtaaagcaaatcaatggaactttcatgatcatctttcaatttcattttaacaacttaatcttccaagtaagtcgagttgcaactactgtcttctatatagtagctttttatttcattatgctacgttcactcttgtatctctggttttttggcgaagcgaagcaattaaatcataacctctcgtgtatgcatgtcacgtgaccaggtggtttgtcctatgggctccaaaatcagtagaaataatgcggtgaagaagtagtctgctgactttggcagaataacctagagaatgaaccatcatatcttccccagagcttctacagtcacactttacgtagtattagaagttagaatcagtcgttttgctctgcaacgactatcgggcggccgtccagatccctcgtaactttataaacttcattgatgcctcaggcgtcacactagtgacgtcaataccatctacataaccccgagctgtcgcaatcccaaattaaggagagccatccctacataattttcctctacaaaattggacgttcgatgttgttgtctcatttgctcgccttgaaaatcaatctttttctaaagcatcaacgccaacaaaagaatgagcacgctccttgaaagactcttccttgcgtatatgatgattgcttattgtagttctatcaaaatttcaatttcttggaactatcagcgagcatgatcgcagataagagctcttcttcaaaagacaagacagaacatgtctccctcttctcaacccaacctcccatcttcattttgccaatgcatctctccctagaggagctggacgagattgaaggccgattgatagattatggcggaagacttacctatgatattgccgaagctggtctcgttttgggaaaagtcgggcgcgtgaagcgtgcagcgctggaactgcgcacccgcggtgtctggacagaggagctcatacccagctcaactccaaaatcaattggcggtggcggcgagccccctctcaagcgcaggcgcacagatcagtacgacggaatcaatgatgtcccggttgagattatcgatctcagtaccgagtctgaaggcgaggatggagctacgaatcaacatgatccatcaaagcagcagatcgcagagaaaaaggcagaagcaattgaaaattcaatcacagtactgaagctcgagtggctggatacctctatcacatccggcagatgtgtttcccaagacccattcgttgtctaccgtgggcgaaagatcccttctcccccaacgacagtgtcagaaaataagcaagacttacttaaacagaaatcaaatcaaataatccagcgtgcaaaggaagatgctggtgtaccaacgccacgagctcctcctccggaccacattcatgcacggcgctcaaaagaaccccctgacagatcttcccagcacccccgaccgacgctataccgaaagacaacctcggaacatgaaatggatgaatctaacgcaccctcacaaccagactgggtccgtgaccaagtcatattcgcatgcctgcgctcagcacccttacaccctccaaacgaagattttatcttgcaactcgtgaaaataagacgtattcgcgaactcaccatcgacaagatcggcgtgcgcgcatatagtaccgccatcgcagcattggcagcatacccatatcccatccaacggccgagcgagatcctcgctttacccgggtgcaacgccaagattgcggacttgttcgcgcagttccaacaacatggtggctgcgagcataccgacgacgacgggaacgttgccgctgccgactcgctggagaaagatcctattctccgggttctgaactcgttctttcagatatggggtgttggggctaagacagcacgcgagttttaccagcgtgggtggcgcgacctcgatgatattgtcgagcatgggtgggatacgctctcgcgtgtacagcagattggagtgaaattctacgaggagttccaggaaggtattccccgtgctgagagcgagggtattgctactgtgattcaggatcatgctgctcgggttcgggcggaagatgcaaatggaattgagtgtgtgattgttggcggataccggcgtgggaagcaagttagtggtgatgttgatgttatcttgagtcatcgtgatgatgcggtgactcggaatctgattgttgatcttgttgcgagtcttgaagctgaacgatatatcactcatacgctctcgttgcatttgacttcttcgctgcgcgagcaacagacgttgccttttcatggtgatgatacaaggaaattcgatactttggacaaggcactggttgtctggcaagacccacacttcgatgctacagctgttgaacataatgaccgtcaggtgaaaaatccaaacatccatcgtcgtgtcgatatcattatatcgccttggcgcacggtcggttgcgcgatactcggctggtctggtgatctgacttttcagcgagatctacggcggtatgcgaagaaagcacgcttcttgaagttcgattcgagtggtgtgagagaccgaggtactggaagacaagttgacctcgaagaagatggagagacatgggaggagagggagaaacttgtgatggagggactgggaataggctggagaccaccagaagaacgctgctcgagatagaaaccgatcagatctcaggagaaagagatggacgtaaaaacatacatatattagcgatgtgtacatcgcagactcagatattatttcatgagatacgctaaagtgcccactagtgacgacaatagcgtacaaagctccaaatcacgcaacccgactaagagttgaataccaccagaccagttcccacatccacacacatgctaggaattatggttatcgaatagattggaaacgggggttactgcatctgccatgttcaagtttcgcaagactcagctacaaccacatcaggtaaacaggaaaaaagtgatatgtcacagcctccacgccaatcgtatggccataaggacgacccagaaaaaaggaaaacataaggtacacaagatacaaatctaccgaccttcggtatggatgcataggagcgaagaaaaagaagagcgcaacaaacactgcaaatgcacaatgcataatcgacctacagcgaatcaatcatcacaccataggccttgagctagccatctcaccatagcgtccacgactcctggtagtgtcgtaagcactgagaacacgcatctggccgccatcgtcggcctgggagaaggcgtagccgcgctgcttacgcatgcgctggacctggcggactttccggatggctttttggaactgttccatgcgtggacggtagtcctggacattgtatttctgaatttcctggacatggtggtattgttgtgggtagtacatgcgcttggcgtacttccaggcataatcacgtaggaggcatatacagggtaggacgatagccatcaagtagaagataggggacttgaagaccacgggaatggtgccgtagtattctcgcgagaaacccaaggctggggcggcgtaaccgtatgccgggaggaagatgagccacagggccattgatcctgggatagcaatgaaggtgtacttggtccaaatgttggttatcagagcagctttgccgagaacggtacctagcacggcggtgtaaagagcttcaccccagacccagtggccggcaacctggccatctgccataggaaggtcccagtagaagagcaactgagagacaatgtagaggatgagagagtggaagaatccattcagaatccaggcccaaaagctgtgcttctggaagaatacacctctctgacctagctggtatagctgtgggtagcggtcgagcaatcgggcggagatgaactggtcaaagattcccatcgcgaatggaggcaggacagtgaagaggacgttgtagaaggagagcgtccacgattcgtagataacctctccggagaatgcgttttggaaagaatactgtaacaagtcaggtaccactccaaatgactcctcaagtttggacttacccagaactgagtcatatacagcgtaatgttcttatagtatgagtacagaatgactcgactgatacgagaatagctccacgctccgtgaaccaaaagcaactttcgaaggaacctgaactggccaattgcgacatcagcagatcgtgcggcctgaaggccttcgacaccgctgataccgactccgacatgagcggcttgaatcatggacacatcattggcaccgtcgccaatggccaagaggagagccttcttgtggcgcttgacaagcttgacgaccaaagccttttgaaggggagagacccgactaaagagcatgttagaacaaaaatataatcctccaaaaattcaacggcgcacttaccaacaaacaacggctttgcaaatgacagccaaatccaggaatagcttctccatgtctttctccaatgcaaaagtcaacgaccgcccgtcaattaccaaagctaaaggttcggagtccccagagacaatttgactctgtacggcgtccattttcttttgcaagctgtcacgggtggcttctgacgactcctcgttgatgatgagaagcgtcatgtcttccgaaataagtttgcaagacatgccgatgttgattgcagtctcctgtcggtcaccagtcaagacccaaatcttgatacctgcagtctggagggtgtggatagtatccggaacaccatcctgcaagcgatcctcaatagccgtggcgccaagaagatagaaatccttttcaatcagttcggccgctttgtccagttcatccgcgcggctgccgtcgacagttgtagaagccttgtcatagatctggtaccattgctggaactcgttttctggaacttcccgcatagccagacacaaggtccgtagaccatctgaggcgtactcctccaggtgctggagagttgcttccacggtagggttatcgggatgcagccgctcaataataaccgtgtcagcacccttacagtagacgcggacctttccatctggacaccggaaaatagtggacattcgttttctagtagagttgaactcgcacactgctagcagttcgtattcaagctcctgtccaccagcctcaaagatcaccgatcttggtcttctgttggtgaatcggaaacccagcgaggcggccccatctaccaaggctccctcatccggcgacgctgcttggtacttgatcacatttgggtcatcgctgtttcgctcaggaataacagtgtgacaggtggcaaggagagtgagaaattcgcgaatagcgttctggcttgggtgcgattgaaggttctctctgagtttcttgaaatcataaatcccaacttcagcatcatcctccatggcagcacgtcggtcttcgggaacatcatcgccatattggataccggcaatgctaacttgcttaaactccatcatgttgcaggtaagggtgcctgttttgtcggagaagatgtactcaatctgaccaagctcttcgacaagggaggatgtgcggcatatggccggggtgtcagttttatcgtagtaaatgtcgaggtcggagttgatgaggaaggcttggaagtatttgacgatttcaatggtgacgaagagggaaatcggaaccaaattcgaatagagcacccagtacgtgaaaatgtccataaaaaactgctttaccactttgaccgacccatagtcgaggtatgcaagcgatgaagatctggtcctccgaatagcaagatcaccgacagaactgatgacactcagaacgatgagaatgctaacaagcatcaaaatttgaatgttgactgttcgctccacggctgttcgcttgatcggggttgctgtcgcatttcgcatcagttttgtctcgtggccactaaaaaccacgattccatgaatccagggagtgttgcgcagcgttgcaccacgaagtaggagttgatccggagccaagggtaactctttctcgccacctccagcattcatagtcaaggtggcttcgtaagtatacagactgctatttggctgttccgatcgaacgcgtccgctcagacgactcagatcactggggctgaccagatgcgcagtctccggaatggcttgcttgattttaagattggtctcaccatccaggtttgccgtttcaatgtagcatagaccttcaggctcagatgacgccaatagtaccaagtcggccggaaaaggctgctcggactcaaccctaactatatccccgaccacaacatccacccattttgcatcgtggaacgaagatcccttaagaacttgtgttttcgagtaattcagtcctctgtccgacattctccgtttgtagtcctctaccaattctttgatcgccgacactgccaagacgatggccagcggaacgatagtcgtgaacttatttgtcggcgacacattggggatttgttgcagaacagcggtaaacaagaagaacaagttggcatatttggagaattgctcgaagaggaatttcggaatgaaggtaaagatgttgtacttggccgtcgatacgaagttgttgacgaacctgtgagtggcattggcaggcgggttgttgagctgaatcatgcgcgggcccagtgtcgagggatcaaccttgcgtgcaaagatattaaggtctgacacgtggaacttcttgcgttgcttcgggggtggcgctggagaagcatcgctcccaactgttccccttcttgcgcctgactcggtcaacggaagatccatttccgaatattgcgatgaccccatgccaaacatgtatttcgccttgcccatcaatccacccccgagtccgagaacgctgttgcgctcatttgccttgcggacgtggtgtgaactggcaattcgttcttcgtccgcgtcgagatcataataacccgagtgcccatcgtcgaagtcatccaaagaataccgccgataattgtccagtccagaagtctgggagtaggaccgatctcgcatgccgctggagtaggggtcattggaatggagaccgatgttggcaggcggatgcgccggtctagaaggagcattttgctgcgttgcgccctgctgtgcgctggatccgacaaagttatcataggaaacagaagggcgcggttgtgtttgggtgtacggttcttcagagtcgtcaatgttgtagcgttctaataggtgttcatcattgacgggggggccttgaccactgttatactcaggtccaggatccaacagcaggtcgtcatcgcggccagcggctggatgcgacccaggaggcctaccgctggccatgatgccgcggggaagctgacagcctcactgatctatcgcaataacaatgcccctgaggcattaatcgcaaggtcacgtcgacagaaagcgctctgctatatctgtcggaagcaggatagttggaaatgaagtatggcaaaaaataacagatttgacgggacttggactgaaaaaaatgtgggaattaagtgagaatgaggtccaagggtggcttagcgggcgaaggcaacaattaagctattgttgcgcgggtaggcggtaaagcagttcacaacaatcaaagagaacattcggaatgatactctgattattattcttactagagtgattgtacagtcttacaaacgctttatattttctctgctctctgctgtgtggtcaaaatgcacttctagtcattggccacctccggtctataatgaatggagctaagaataggggactcttggcagccggaaatatattaacagtgtatcgatgtatggaccgacactagtcccactttagagatgaagatctgctgattgagaagaaaagggtaaaagtagctgatttgaacgatttccctcaaatcttaggcgaccagtttatatttacaactgaggaatagtgattcagttcattcatctactagcccgcacccatatgtcgcccatcacgtggcagccaagtattattgatgtaaacgccatgcgaaactccagtcccccagtcatgaaagtaatggtagtacatattgtttattcgatttgaaccaaccggtcgttttctgcccgagactcatcagccatgccaatcttcgcccgcttagctaggtcggcttggaggaccttctcaatagcagcattgatctctttgactttctcccatgccacatttgtcttgttcacgatcgccatggcatctgcaggtgcacctgcgtacttcgagaggtagcaaacatcgcctgcgctattcatcccaataacaatatctccctcagccgcctgctcctcctttagggtggcatcaacaatgacatgtttgctatcattgtaggtttggaatgtgaccgagagaggcttgtgtgttatattcagcgggacaggaacacgttgttccacgccgtagactatgacacgcccgtctctcaccacagcatccggcctgcggaagtgttgcagcccagccatgaccgcaatgcaggccgcatcggtgatatttccatcgtagtcaataatgtgaacatcggcccgaatcgaccagcagctcacacccttcagaatacacaaggattcagtatcgagggcattagaatggcggatgatacgatcaaggatattggtggcgtatgcttcgatgtcgttggttctgtagagataattgtgagaacaaatcaatatataatgaaaatgcttatgatatataccttccgttttcccaggccggtgagcccattgcactaagctccaggttgatgttgaagagcccatcgaaaggtcggtcttcacgcggtttggtaacctcagcggagatgcgaacaataatgctagagaatcagtcagtgatttccatttgtgataaaccaacaaaatatttgaagctcactttgtcttcccaagttgtagcttcacatgtccatattcttcaccaaaggagatatttagaggacgatagtcgtcaggcttgcggccatcgagacgcacattctcacagagtgcttcgagaataaagtcgcgctctgcgattgagagttgcgcttctttcgacatcgttgagggaggtctagcagccccggcgcggggatcaagagttgctttcttttttgggccattttgccaacgcaggccgcattgtagcagaccggattattattatcccgggagttacaccaataatagcggaagttttgtagagcggtgacggggacgtgaggagaatattagtgcctgaggcgactacgtacatcgaaagctggaagccgtcaacggcccagcaattccaactctcacttagcaaccacatcacaaaatgactacaggtatgccattcgaaccaaaattggagtatttggatagtcagagctaatatttatttagcccacagacctacttttgacccggtacggcaacttttcttaacacgactcttcatggacactaactgatctcaacaggctcaaggtaaagaagccctccgtggcccagcctaccaccagagactcctccctgcgcacaaacacctcaaagttcggtatgtatgccgatatttagtcagacaaccccgatcactgacattattctagccaacccggacaaggcggtgcagctgacgccgacccatcgccccgtgaccttcgcgcggagcttctccaggccgaggcggcgcactttgccaaaaagaatggcgttccggtcgaccagccagctattgctgaatcctccgtccctaagcgattgcttgaagctgcgccccaagatggaagcgagggcgatatccaggaagaagacccagaggccaaacgccgacgcatattggaggagacgcgcgacatcgatgccgattcagacgggtcggaagaagacagcagtgacgaggataggtaggtaaacctcaggaccacatgcttaggacgaataaactgacaaatcccagcgacgacgaagatgaggcagccgagttgatgcgggagcttgagaagatcaaaagggaacgattagagcagaaggagaaagaggtatctcgctttctcgcactttgaattcgataacggcggctaatgcataacaggagcgtgagcgcgcggctgaagaagaagagcaacgtgaggttgatatcgcacgcggtaatcctttgctcaattcccaggatttcaacatgaaacggcgctgggatgacgacgttgtgttcaagaaccaggctcggggaacggagaacagagacggcaaggaatttgtcaacgtatgcttacttctatttggcttgttcttatggggtttaactaattcgttttcaggatcttcttcgttctgatttccacaagcgctttatggtatgttcatatgatcgctattattttgatacatttactaaccgggttttcagggcaaatacgtgcggtagagtcttctaggatactagagcatccagatgttagttcaagggtattcagcttagcgaatgggtcttattcttatgttatcttcaaatttgtatcaaaagagcatcataaactgtcaataattgtatccccaaaaatgctcccagcaatctctacaacagtaccgtttcaatatctctgctggatcgagtggagttttgttgtaaatcagcatgtgttctgtatcattcgaatcggtccctaccaacatatgaaatatactatgagtagtagcttaatgtatggagtatggcttgaaagatattggtctccaatatatgcattaacgtgcattggccctgtcgtcagagcttaagttgaagggattgtagtagttgatttcctagaaggacattttaggtacttgactaaaatgcatatagatgacttccagccaattttgttgtattattattcaacatgattgcacaggagctcgaggcctatttagttcaccagaaccccggctggctctctttccccacaaattcttaacatctgagacggccgaagataggaaagtccagtatccacctttctaaaatacccataaggtactcctgatgagctgtacagcagtggagggatacttaactagggtgctttccatagagactagtcaaccatcccagtggaataacgaagtccctcccgctagggaaagtcgagtacatatcgttggcacatgtaggttgcatatttcttcagaatattgctcatgtctatcttctaaatagaaagtttctataacgatcctaagaagaatctgtgacatacgcaactcatttgggtgcatcaccccacgaggggaacaccattggaagagcctctggagtttgatcaggccaattggcctggattaccttcataatttcatcgtagacgatgcggttcccagccggagacagatgcagacctatatgacgagtgagtacaagagaaatgaaagggagggaatatgcatatttcacgcaccatcaatgagcaaactagccaatctctcattgcttggcacatcatgagccccaactagaggttctccctccttccatccagtggtcttcatgaaggcggaccatagatccaccaccgggatattgagcgatgcaccaacctcgcacgcagccgctgcatacgactttgtgaagctcgcagttctgcttgggaacggggtattctttatagcatcgaatttctccagttgatattcattgatgggaggtgggctgatcaaaatgagtcgtgggttctgtgcgcatgtcgctgggtgttgaatgattgtcttcaagttctctttatattgatccaggggcacatgctggctgtgtgttggaacgcacgcatcgttggcaccgaagaagatagtctatccgatgttaccaattggtatttcgagtacattcgatatttcaaatggggttgctcataaggagggcttaccatgagtcgcacattagctgtttgcggcaaagggaagaacttatcaaagacctttacagcatgggcggttgaatatccactgttacatgttagcatatcccaatgtattatagctttggatgatcttacgctaggccgcggttgacaacatccaatctacgactgtaggctgattatttctttcattagcttattgaccatgcggatctcttgggttgtcagaatattgactcacattcttggagcgcagcatgaaatgcaaaacctagctcttggttgcaggccatttgagtgatggagtctccaaagagaataaattggtcatatggtttgaatgcattcccatccccatccccctgggtctcgatggtggccatggtgaggcaagaatataaaaataagatcaaattacttgggagtttggaatttaagtcctgggaattgaggattgggggctgataacaacaagaaacggacaggaaaggaagtgggggaagtcactccgcggacaaaaaggaaattggtggaccttcggttgtcaactaaggaatgaatacatgtatatcatcaagactagatcatgagaactacatacatatgtatgtacaataccgattatctaaatctatataaaatctcaaatcaatttatctatccgttcatcgaattgggggtccagatctgaaccccgcactatacgaataggagtataacatagacctttgggttactattatatcaaggtagcttacatgagtataaccagattatttacgtccggcatcacgagtttgagacctctgtacactctaagaatgcccttctcgtcctcctggtccttctaactgtacgaagtagtaatggtgatctgtgtccatcgcgaccccacccaattccagttttccaattactatagttattcaaaggaccatgggtggtcagagaagacacaagaggaagacgaagtcccgtgttagtcccgatataggaaggggccacggcttgaaatggccttgatgaaagttttggaagactcggaatttcagagttcgaacacgaaagtcgaagtttttctgggattgatataagttgaagggccaaggctaaaatatagatgaataggaagaaaaagagtgatcgggttttcccggcgcttaaaagtgacacctaaggttcgagcacatgtaattattccgcggtattcgcataggatgaaagctagcgattctcttgttgaatactggcatggaatttttacatgtctagctcgatggctagttgatttctttctccctgacctacttcgcttactgagcaaatttaccagaactagataatcaagagatctagtaaatgaagatatcgaattgcaccatgaatgtgtggatggatatagaagtgcagagctatgggttatcggaaaaatgaaacacaggagcaagtaatttctcttttacatgacatcgctgtctgatgatgctcaactttgtcccactattcagcatactttttccttaggagagagtagctttgagaccatgaatgtctagttcttcgctgacttcaagcaacacacgtgcatcttcttgtactaaaatagttgtacacaaaatatgtgtagagttatcgtgaccccgacccataaaagaagctttgggactacttgctagtcgccgaaacccccatatgcccgaaagagcggtaaaggggatcgtgctgaaaacggtgctcaaaatgatcttctagctaactacgtaggtatggatctcggagcctatggacgacttgtttataacggatccttcaatgtctatcaacatgtaaagctggaaccactccccgggtgatatgttcgacagtatcgagtttattcatacctcaaagtagactggtcctcaagtcacccccgtgctaaagctgatattcacatctgaagaaagtcagacatccgaaagaggctgacgttgtctaccttaggatgacagagtcacacacccacccctcacacggtggcgcacgcttcataaagcatgccaagagatcagcgttgggtgacgatcggattggacaacgtctggcagaaggattccctcagctgggcggatgctcctagtttagtaacccaaagagatacttccccaatcaactaactagctatgatacctcgatgctctcgtttatcgtcaatgattcatcagtgtgtggaatgtacattcgcgattcgacgtgatgcagccactctaggcgtagtgaccttgttcatcttgatcagctgggtcaaagtgtccattgcgacaggcatgctctcctgtatatatattgtagggcaggatgtaagtatacctatgtaccccgtgctcgcgacgccactctggacgtgcagcggcaccccgggattcgtttcgagatgttgatcgtaggaaaaaagcagggagagagaccatcaaaccaccagcacaacatgccgagcattgaacattcagtaaaatatattaaagatacgcaaaatgactctagtggctggggggtcactctcacctgacgcgtccccgccgtttcgatggtcacctcatcttaagactcggaccctcttttctcaccgtccatctttttgtgtttttgtgtttttgtgtttttgtgttttgtttttatctttccgaagaatataacttttggaaagagaatatgctacctagtaagtcgagctccttgatttctttgctcgtgtgagttgtttgatgtggatcatctctagatgtcaaaactgactccttgctagccccactgcatataattgaagcataaaggcttctcggcgacatgcctcgctcccttccaaagtccagttttgcctcgcgcgaacaggacgacaccgaaaacgtgcgcgttccccaaacagctcctccctcaccgagtatctacagacgatctcaaagctacctctccgaaacacataccgaataccagtccctcgatgcgccgttcgaggttacagaaacaacgagcctccttgggcccgcccaagccttccgccgacgaggtccgcgacggtcttacaccagcacctccggggtttcgggcaccggtccggactcatttagacacgttctggcggctggtagcctgcggcggacgctaaatcatagccgtgccaactccatgagtagggggttcagccggcgagggagcatggacggcgacagcagacccgctagtcttcctccgtctatgaaggacaatcttactgcctcttcatttctggatgaacggacttggtatgatcaattcacttccacagattgggtgcatgacagtatcgccgatggagcgcggcttcgcctactccgtcagcggaaagatgtgcgaggccgattgctggcggctttcgacggtgcgcaaggatggatcttggtcgcgctcattgggtgcatcacggcctccattgcttacttcgtcgatgtcaccgaaggatcggtctttgatctgaaggaaggcttctgcacgacccggattttccgcaatcgaaggacgtgctgtgaagggctggctgcttgtgatgcgtggcggtcctggtcgaggatcttctcaccatcgggtacagaaagccagtgggttgactttgtcatttttgtcttttgggttgtggcattagctctcatatcgtgtgctttgactctactcacaaagactgttgttccttcttccatttctcttgcgacgcttgatgaaaacctgggcgctgacccccgtggtacaaaatctgggaatggccttggtgcctcggattctcctctttcggagacagagacaagcccactacatggaactttgcctaattatccgtcccgtccagctatgatctactactctgctgctggcagtggagtggcagaagtcaaagtcattaacagtggttttgtccttcatggatatctgggcttgaagacactagtcattaaaaccattggcttgatttttagtgtttcgtctggtttgagcttaggcaaagaaggcccatacgttcatattgctacctgcgtgggcaatatctgttgtcgtctgttcgccaagtataacaaaaacgatggaaagcgacgagaggttctgagtgccagtgccgctagtggtgttgctgttgcctttggtgctccgattggcggcgtcctcttcagcttggaagaagtcagctattatttcccacccaaaacccttttccggacgttcttttgttgtattgcagctacgttgtccctcaagttcctaaacccctatggaacaggcaagatcgttttattcgaagtccggtacctttcagactggcaaatcttcgagattttcattttcatccttctcggtattatgggaggcgccgctggtgcgctcttcatcaaagcctcgaatctatgggcacgatcattccgtcgcattccagctatcaagcgctggccaatgcttgaggttttcctcgttgcgttgtttacgggtcttgtcagtttctggaatcggtacaccaggcttgctgtcaccgaacttctatttgagctagcttctccgtgtgaatcagatgtggaaagtacgggcctctgtccccgcactgacggcattcttgaaattgtccaggaccttctggtggcgtttgtcatcaagagtttcttgaccattattacgttcggcatcaaagttcctgcgggaatctacgtgccatctatggttgttggtggcttgatggggcgaattgttggacatttgatccagtactgggctcttagacacccgacttttttcttattcgactcttgccctgcagttgctggaattgagtcgtgcgtgactccaggagtctacgcattggttgccgctggagcgaccatgtgcggcgtgacaagactgtcggttacattgcctgtgatcctgttcgaattgacaggaagtctcaaccacgtgcttcctttttcgctgtcggtgctctgcgctaagtggactgcggatgccattgaacctcgcagcatttatgtaagttttgagatccgcctcgtaacttaaatttgacattatactaattgaaaccaggatctcttgaccgacatgaactcctaccccttccttgatagcaaactccaaccgaccaccgatgccttgctgggggatatagtccgaccagtgcggaagaatcgcatcatcgatatctctgcatcaccatttttgccagccacagacctccgtttgaaactggaacacctgctcatggcaggcgagctagacagcggacttcctattctacgggacggtgtcctagctggtctgatcccggcaccggatctcgagtacgcactagatacgctgggcgaggaagaagaaaatacgatctgtctgatggccatggacgcttcttcagccgtcttggacagcgataacgaggatgccgacgaggtggatttcagtcaattcattgaccctgtaagtttggttaacttcttcaatatcttggcccatactaatttgtttatacataggctccaatcgctcttgatgttcattcccctatcgatctggtctaccaatgcttcgccaagctaggtcttcgttacctctgcgttactcgggacggaaaatatgccggcctggtacacaagaaagcattcgtgaaattcatgaaggagaatagcgactaggccgtggaaatcggtcgaccactgtactacttctcatttgcattttccggcgttgcctaggcattctacttcaattgtttgtatagccttgcatatcctctcgtttcattccatgtctatcgattatgtctgcctactcaaccaacattggcactgtgcatagttttgttgtatatatctttcttttggacagctaggcatgaagtacaaactttggaacatacttgactagtcatttatcagggaagaccatatcctacccatgtctaaatcaatttttcaaatccaaccatctgaacctcaacatccccgtccttcttccactccaaatcaacaccctctccaacccactcggaaacctccccggggctaacaggccgccacccattcttcttgtgaagcccatccaacgggaagaatgtatcacactcaaacgaagtaggcacatctacagccccctttcgcacaacattcgtcatgacaaccctaacaggccgaccacgtagctcctcggcacccatattcaacgtagcattataaatctcggccccacctataacaaaaatcttgccaagcgtcccctgcgccccatacacagagtccaactgctccaaagctgcgcccagactcggtgtaacaatcgcatccgtcaccgggcccaccggcggagctggaacagcatccttgggcggctcaagagcttccttttccgcacttgtggcctgtgcctgagcggccttagccgcaatctttctcctcatattccctaattcggcagtcacgctctcgcgaacagacccggatgtgtcacgcgtgaccacaacgttaatgcgcttcgcgagtgggcgcagtgaggctggcactgagtcatacgtcttgcggcccatgatgatggcgttcgtcgtgcctggacccggtgggcgggatgttacgcgagcgaagaatgacatgtctgtttttatgcgcggccatgggagcgtgccatttaagccgattcctaggcgcgtgatttcgtcttttgtggttgtcgacgcggtgcggatcggggtcgtcgccacgatcagggtgagggagggaaggggttgcgggttgtgcggtggcattttggtttgcgaggtgatcgtagttgcaattagagaacaaaatattgttattcagagatggggagtgtgatatttgggttgtgagggaggttgttgaatagtggagtggaggctcgcgtcgcgaacagagaaatcgttatcggagttgggccgcttatcgcctcgcagctccaggtacacgatccaatgccaacagggaaacattacactactctattctaactcggtcagcgaagcagcagagtgatagtcaaaaatgtgtttgtattcaacatcacaggaaaaccgaatacgccacaacaccagtcgaacgccagattaaagggaccaagtgggtatcacgcgcgagacagctccaagaaccaacgaccaaaatgcttaaaggagatcctcggaaaattatcgttacttatcggattgctcagagttcttggaattctcagggtcttccgtttcgtggtcctcaggttcatccgacgatggcatcaacaatcctttgtcaagtgcgctctggatggccgtcacatcctcctcgagcttttcacgacgctggacatcccgctcgtcttcgccaagagtatcgagcttaccgaagagccagagctccttcatgagacggtgcaaggcgagcaggtcctccgaggcacggatctgagatagcataatgtcaatttcgtgctctggtgtgaattcagaagctcaactgcatttttcttgggaaggggagaggtggccgggtatgaccggggcggcgcatgtcaacataccagcgcagtggattctacatcaatctggaatgcttctacagcagcatcaacgtgactggtgccgtcgaacttgttggcagcaatggcgacgatattttcgaaccgctgcagcagctgcgagatatcatagtcgacgcgatctgccgcaatacatcgttagcggaaaggtatgggagcatggtatagttgcagtggctcaaatatagtacgcaccaagcaactccttggcagttggacacgaatccatggttggagcgtactttttgttgtcttcggatgatgaaggtaaatccgcgatccatgttgattacgataagaaaaattgtggggctggaagatacgggtagacacgggacgggaacaaaaccgacattatccgaacttaacatcctaacaagccaaggagtaagccatcgtcgctccatatcttgagggccttgctcttcaatgcctcccattcctcgtcttggaattgaagacccatcgaagtgctatgaatagacgtgaaagtgtctgcatatctaggaaagagctttgaggcccaagagcgaagaagagtctttgggcctttcggccctcgaggacatacatagttggtaagatcttcgcggcccttctcacgaaagatagcagctagccgcaattgctccccagctagctcattagagccgttgtagaactcggccagcggccacatcatgcacgggaacaaaatgcggtttgggtccattcccagtctatgactcccacaacatcgaaacaatcattaaccaaatatggtcacccttaccatccagattttgctaagccgtcaggcggtgaagactaataagtcacattgatcacctaggcacttcagataggctatagccatagatgtatgtaactagaaatactgaatatgcttgccaaataactccaacgtattgagtaatgacttgtataggagcccacagtttttacagtataggctgtatcacacgggaaaatgtgatatttagccgtcaagtggtggaatacccgaagcagcaacactagtcttcaagctgatatcctcattcaaatctgatggtggtcatgtactttgcagatcgggaggatgccagcttggtattgaaataagaccgtatgacactggcctgtggcaatagttgtatatcttaattggccatgtacttcgacatctcctacatagtagacttctcttagcacaaacgttgtgctcactttgttatcgtagtgtgcgaatagtaccagcggtgcaagttggaagacattgcactgctagatattgagtaacatatgttatgtagaatacgaaatatgaatagacgttatggaatggtggagtatacagccttggaatgcgcgtatagtagaaggtctagccctggggcctatgatcgtcctttttcctccactttaactctccgctttactctccgcccctaccgtgcgtcaccgcctacacccttcgacaatggttcctctctaaattactcctcacaacaataatcctttcctcctgttgctaggtttgctacctggaaccctttctctccgtgtctgtatcatcctcttgaggcctctatagtcgcaaccttgtgttactttggtctcgatttcgcatcacttcgcttgcaccgacggcccaatcatccgcgactcaacttgtgcctggcacatcatataccatacgtcaccgaatacttcatcgcgtctttctgtggacttgagattgctcgtgaatcgcctcaaacccatcaataatctcgattacgataccaaccatcttgaaacgcgttcccttcatctgtgccaataccatcgtctatcttccctcaactccctgctggatgttctgatcaggtctccagatatttgtccttcgaagacagggtggacggccggtgggccgtctcacagattgaaggcggcaggagatattggagaaaaaggtgtcgaattgaagtaacgccgttcgcgcccctgctcttagggtggactattccaactaccccgcgtcaccttctctgctttattttctttttatcttgagttctcaacactggaaactggactggcgatggacgcgcagtatccctttgcttcccgtgacgacatttggcgtgtttttgacgagttgaaggagctccacattgcccagtacgagcaaggagaacggctcgcgcaactggagcgtcgccgggacgaggatgcccgactgagaagtccttggtgtcctgtctcgccgtttccgcactcggttggggcaatcgctccaggtagtccacctctgcccttcacgatcagctcgccacttaccaagacatcccttccagaccccactttccactcccccccggatgctttcaaaggattcgatcaaggtcatcattccgcaatggccagttctgcgatcggattcgatggcgaagacgagcctagacggggtacgtcacgagccaacagtgtccgttttgacgaaagtgctatccacgggaacggccaggctagccgttccagcaatgaccttcctctgcggaccggcagcggcttgagcacccacccgcttcttgagcggacattttcacaccaatctgatggacgattgagctcctctggccactcacaccattccgctcggactaacagcctgcgcctgaacaccgctcggctgcttggtactacgcctatcgagtcccctctgattccccctcctggactcttcttgcttggaccggtcccgtccatcattcgctgctggttgactgatactttcactaatggctctctcctctatgcagccgtttgctcgggctcttacatctcaagtttgggtctctctatggtccgcgaattcgggttggagaacatgattgtgtgcgagggcgatgtagagtacatcaagctcccgctttatcttcccgaagcacttattcatccatcttcatcacgccccggaacccctactcaccaagttcctgccgtgaccattcgctttgtggtttgcgagacagaagtcggcgataattcgattcaaatcatcattggaagcgatgtgatgcgtgcgcacaatgctgatattttattctcacaagataaactgatcatggtggacgatgaccacaaccgcgtgtctgttcccctcgttcgtcccgagaaggactccgtgtttaagtccctccgcacttctcctaatactggagacatacgggaacctcctactaacggacatccatccgttggtatcattggccggcctgccaatgttcaacagaaacaggcctcagcgcccccatcgactagtctgtctggcagcgagaatagcgatcctcacaagtcccacctacagaacctccaggctcatgctcacatttcagctgaaacgcgctcagctactgtcaatccaccgactcctgagcctactaaaactgaggatatgccatcttggggtggcccatggcgtcgcgatgccaagaaatccgccagcactgcccagaaggtggcggataaacgcgagatgaaggtcttccgcaccggaaaatccacgagccatgcaaactccacaacttcgggctcgggtcctggcagtgctaccactgagcaggccgacaagtcgtctttgccgattgcttctgtccaccacccaaatactccttcggacaagtatggcacgctaaatcccgtgggtggtgcatcggcgtttggatggctcaacccaccccatcataatgcctcctcctagatgaaacagactaggcttggcttttatgtttgattacaaccgaatctgaaatgatctcggcttatggcatgatacgcaagggttgcgattccctggaaatcaggaaaagtgagaggcgctgagttaaaaggctgccaacatagaaggggaaccactttttctttttagcttgtagtattgctggaatgacctactaagtaaaagagaaaaaattgaggaaaaaatgatattcttaccatttaattcgcatgaccaggacaatatcaactgattcgattctattagtatatgtataatcctcctcatctcccatacattcataggtacagggctggacgttagtaaatattagtaatcaatactccagggggctggagtgcaaaatttacgggaggaatttcagcttctgcctggcaagaatacgttttactcgttcgtttaaaatcacagccaaaatcgagatccagaatcaggacgattggccttgagagcaataataatggcaggtctgctggatcttccagctgaattgattctagccatcggtgactacctacaaatgggtacgagacagataccactgccattccatgagcttggagatgcctaccgctacgcaatagagcgtgatccaccacctagctccaaatcccttcattctttcctactcgccacctgtcgcctgaatagtcttctacaaccacttttctatcgtgatatatttgtccgcagatatggtcatgtcggcgcaccatcgccactgcagcagctaaatcggagtcttgaaaaggacccaggtctccaagagcacatcatctcagcgatcattccatgtgacgactctatttatgatatccatcatttcttttggttttccaacatacgagaccttactattcacaagttcagtgattgggagcctttagaatttccaaacaactcacatattggcacttcacctgtggaatgtctaaagctgattgattgtggggcgcatgagggagctctagccgctgtattaagctggccggcatctttgaagacgcttcactacgacgccgagcaaggtgagtgggagggccatattggagacgaaccagccaaaacctggacatgtgctgcttttgtgcgcacgctgcaaccgcaaaaaacaacgttggtagaactgacgatgacacggccaccgcttgtccatgaaggactgggcaatggacctcgcattgatctgagcgagttcatggcccttagaatcctgcgcatttatcatgtcttcctctgtgggtgggatgctccgcatggggtctggaaaggcttacctcacagtctggaggtgttggagatcttttatgacgataccgagctcactgaattcctgagtgagactgataatttggagcacgacaatttcatgctcgatttgatccagcataagagggtgcatcttccatatttacacacagtgaacatctactcgactgaaacagttcctaattctgaaacagaggaggatgtgctcgagggaagctggaggctggcaccatctttgctcgcgcgcgaagcgaaatctgctggtgtaaagctgaaagtatggctgggatacggggataatcaagacttcgagaaaccgacgttttcgagtcactagtcaaaccaaataatgtattcagccaagtggtaaccacttatcacatgcattctttcctagaacatctactatgaaagattagttaagcactgtacgttacttaaaccaggtcccatcaaatcaaatctttgaaaaaacccccaaagcccccttcgtattatccttcgtttccttaacaagcccactaacagcccggaacgcttcgtgcgaagcatcaccaagaatctcaaaaaggacactctcactactcgtaacaacagccccagcatccctcaacctggaaagcgcaatccccctctcctcggtgttcatactgctgacgccatcaacaaggatgtaaacgcggtgaccgcgctcgagaagatcaagcgtcgtctgcgtcacacagatatgagtctcgatcccgacgattatcacgtcaaggggcgcagagccgggggccgggagcagcttctcgatctccggggttatcattgagaagagggttttatctacgtcagctcggacgtgtgtgtcgctgaggtgttgctggagttctggcacggtgttgccgagtttcgcgcggttctgggttgttacgaacacggggattttgagggctgaggctgcgcggagcattttttcagccgttaagaccctgttggttggttggctttttggtttcaattgttcttgggatatgggattcgtacagtttggggaactcgtagattccattgcggaatttttcttggatgtcgcagatgctttggaattgagtcagattttgaagctatatatccttgtttgatactggggttttgcatacaagagtgccggattgcctggtctagtgttaacttgcactgcattaggattcgggggtttcttacggatccgagatgagcgcgcaagggtagccattactgcaacagtttgtggttcctatgtgaggttttagggactcggtaaaatgtaaagaagagaagaattggcggggacgtggggagtcggagaagtcggaaatgcggggaagaagccgagggaagacgagctggtagactatctttgtttcttttaccgtaaatttcaatcgattatggtcatatttggatcggtatatatcgctcgtctactaatctagggatctatagcttcacctcatgcaccttggcccgaccgacaaaccagctgtcatcaccgtttgccgccgctgtgcgaatggcataaagctcgtcgacgaatgccgggacgaagcttcccgggccgcgaacataatctttggccgctgcgttctccgctgcaatctcgtacatgagaatcccagacagcactgcgaggagtctgtcagagcggtgggcaaccaggaaacagccggagattgtgccgatggcacagccggtctgtaaattcatgttagctgtgtactaaaaggatgtgtttggggaggttgcatactccggtcacttgccccaggtatgggtggccattctcgacggcaatgacccgctcgccatcgctgaggtagtccgttgctccggtcaaaagcacaacgttccctatcttaaattagaaaagaggaatcacagctagaaagcctagagagtcacttacgctcccggcgagccaggtcccgagccaaggtggctttttgattgccgtcaagggtactaggtccactgtcgacaccgcgctgttgaacagtactgctaccccaagcttggcgaatttcgccctcgttgcctttgatcagatcaaaataacccccggccataagctgggtcactgcattgcggcgaatgtgtgtcgcagccgcaccgaccgggtcgtagacgactgggttgccccgctcattgtacgccttgatggcttttaagtagtttgagacactctcgctagtcaatgtacccatgttgatcaaaagagcaccatcaaacttgcacaagtcggtggcttcatcgccatatggagacatgatgggagatgcaccactgtagaacggttagcatgaaaaatggctggccaggtacagtatactgacatagaaagggcaacgttggctacgaagtttgacacaacaaaattgatcatgttgtgtacgagaggatgcacctcgaccatcttacggatgatttggggcacctcatccaacaaggcctcgctctcgttagcacgaggaggattgagagcctgtgcaaaccggggagggtttctgatgagcccggcgagtttctcggcggatgctttggggtcatcagctgccacgatcgcactaacaatggctactccatccagtgatttctttggtgactgagactgatagagcactcgttgcacattagagtggttgatgccgccgatagaaaccgtgcctatggcggaagatttaatcgcatctaggatggcttgagtacctgctgttccgatgactgacttggtattggttttgctatgggtggttagcgtctattgatgggtgttggcatattgaaaatgtggacttacgtgggggtggcaaacatagtaccaattccgatatagtcggcgccatctgcggtggcttttatagcctcctcgactgaggacgtactgataccaataatggcattctcgggaagaagcttctttgcttccgcgaagcctatatttgacattaatacatatatttttgtagaattgtagcaacgaactcatgtcatcttgacctagatgcacgccctcggcaccaatggcaagagccacatcgacccggtcattaatcaaaagaggcacattgtacttcttggttatctggtgtagtttccgggcagtttccaccaagagaccagtgtcattggttttgtcccggtattgcaccactgtcacgcctgcagtaggggttagttgaataattggcaggaaggctggagcaccgttcacctccttgcaaagcactttctaccactgtgcataaatctcgtcccttgagaatggccggcgtcgaatccgtgaccaaatagagcgacagatctacgggcatggtgtgttggccttgggccggacaaaagcggggagtttcggggtaatagatccgaagtcgttctgacgaagagaatcaaaccgaaatgaacaacggattgacaagtccagcagaggctgtacaacgcaagacactgtacttaagtcactgaggaagattgccgtttatcgttgtgtggtcatggtggggtcttgcaaggttcggcctgtactcgtccgggtgtagagaacattgtaaaattcactcatagcacctatatatgcttcaatattgccaatggtttgctttcaaagtgaagagactcaaacataaggcaattcttgtcaaaagtcacctcccatgtactactatacccaacgttcagtggccatttatactccgagttatttccggcacgtgcccgctgacataaccgtgatttgtcaaattctgcttttcattttcttcttctactttttcccaacaacacacaaacactgacaggcatcgagagattttcgaagcctttatctatctaccgcgtggacttccagttctacgctattcattattgatcactggttagttcggcctcgccatcatcacttttcaccgtccgccccaaggtctccgacctctgactcggattcccgaaagaacttcgatcgttcccagcaagcaacacgttgagaagtttcccgcgaacttgtctatgtattcgtcctccgtccaaaatttcgaacatcacctgccgctcaagctgcaaacgtttcgcgcgccgaaaccttgcagcatacaccttcgatcctgtggctgaataccccggatctttcctccccaatttgttgtgacttttcctaaagaaatcacattctataatcttcaaaaaagaaacttgacacgcatgtcttgtctcgtcaacaaaattctcatccagaatcctcccagctttccctcaagcaagcccactgtttcattctagtgaaccaaccgctcagttaaaccgtcatcatggccaccgtcaatattcgccgggatatcacggatcccttctatcgctacaagatggaaaagctccaggctaaagtcgagggcaagggcaacggtattaagaccgttgtcgtcaacttgaactcggtcgcccagtctctcagtcggcctcctgcctatctcatcaagtacttcgggtttgaacttggtgcccaggccaacgctaagccctccgacgagcgttggatcatcaacggttctcacgatgcccccaagctccaggactaccttgacggcttcatctccaagtttgtgctatgcaagaagtgcaagaaccctgagaccgacgtctctatcaaggacgacaaaattaccctggactgcaaggcctgtgggcagcggtctgatgttgaccctcgcctcaagctaagcactttcattgttcgcaacaaccctaagggtggcaagaaggagaaaaagaagtcccgccgtgagcgaaacaaggagaaggctgccaatggcgaggatgctagtccaggtgacagcaacaactccgagaatggtgatgatggagattatgctctcgaggccaacagcgatgatgaagtgacccgtcaagctcaggccatcgaggccgaggccgagatcaaggatcacgagtgggccgttgacgtttccgaagaggccgtgaaggctcgtgctaaggagctccccttggacctcaagcgtgcccttgtccttgaggatgtcgacgacgagggagctgatggaccctcgtcctacgagcagttgggcagctggatcgttgaaaccgctgctgagaagggcggtgttaccaacgttagtgatgttgagatctacatgaaggctaaggagttcggcattgagagcaagcacaagactgttgccgttctggcacagagcatcttcgatgagaagattgctaagcagattgaaggtcgcgctggtttgctcaagaagttgatcacctccgatcgccatgagaaggctttcctcggtggtaccgagcgcttcgttggccaggatcatccagagcttgtcgtccagatccctgccatattgctgggctactaccagaatgaccttgtgtctgaggaaaccctcaaggcgtggggtgccaagaccagcaagaagtacgttgatatctcgaccagcaaaaagatccacaaagctgctaagcccttcattgagtggctcgagaatgccgagagtgacgaggagagcgaagaagacagcgagtagacggtccacgctgcgtatgctattctgtacccttggctatttgctttttgcctctattcttaattgaaaatgcagttttgggccttggtctgcccatctggcattaagtgctcggttcgattttcatgttagtttagctcatcaatccccactcctttacaatgaatatctatatggtatcaaccatcatcaattttcatccacactagtcgtacttgagtacttgtacaagttatgtacgaaagcagaaactttttgtcatgcaatgctatcaacgacgaaaagcaataactagaacattatctcagcaagtctgacttgcgactcctccccattgacaaggatattagtagcaccaccacagttactagcattgcctgtagggaccacatccgcccttaggcgatgccgcataaagataaaccacgttaaatccacattccaagtctccatcgcccgaatcgcttcctcgacagaaaccatattttcaccataagtatcattcacagacatagtcgtcctcgaagagaagaaatagtactctggccccacaaacaacgcaatccagccaccaaggatctcgcaaaccctatcacccacttccaacggtaaccggacatgcaaaaggacagtgataaaaagagagaccaacgcgcgccacagacggtggtgcggcgtgaagaatctcgatcccggcgttgagggggagagcgaaagggacgaatatagggctaagtgtagagtggacgccagatctcctgattcagcggcagtcacggtcatggtcgtagcctgggaccgggcacggcgttcgttcgcggccacggcgtcaacgcgcactttatcccatacttggcggtacagccgatcccagcgggagaattcggtttcgacgcgcgtggccataaaatcacccgcgcctttgcacattgcttccatggcctcgcaggctgctaccgtaacgaatgtttcttcttggtggtctgggatttcggggttgcgggttgattctgtggatgaagtggcgatgagggatttggaggtttcatttttttgtgacgaggggaagattattcggcttgctactgtcggccagaggtcgtttattagaggaagaaagctcgtttcgttttgggatagggcgggtaggacatcgataaggattgagaggagggagcgtcgaaggtagggagatggtgaggttaggtgggacgggatagatttgacaatgtggaggaggagggcatgggttttgctaagcggcttctcggcatcttctggctctttggggggtgggagtgacggctcgtccgattcggcttggttcagaagctcttcaatggacggctctggaggaggcttgtcgtatgtttctgaccatggctttttggggtgagggattttgccatcagcatctactaattcgtcctcggcatgccgtttggctttgcggttggcaattttcgcggcgatgattgagattgagagattctcgtatcgagacttgcgggtgtcgtgggagccattctctttgctttcctcgattgtgagcaaagagggtttcttcgccccttcctcgacgactgcagctagtgttttgaacatcacctcaacgagtttgggataaccgtgatatagatccaaaataccaaatatagaatcaaccagatcatccagataaggtatcaacggggcaccgcaaagcttgaccatcataaacaggacttgtggcgggtagggtgacacgtcaaatgtattgagtttcaaggctaccgagttcaccaaatagtccacgttctcaatgatcatcgtactcgtgtctgggtagttgcaggcattggtcaagatatttaggcatgtcatggcgtggcgttgaaggttaggattatgtgatgccagcagctgtaaagttgggtagagcgcatctatgagctcaggtcggaaatcctggccaagttgctgagcttggagagccacggattccaaagccagtgctgatatacgccagtcatctgttccatcgactgacagttcgttcagtatatttaatgagatataatacaactcttcaatcatgccgccacggtcagttgatgagacagacgcctcaacatgctcaagacagatgaaatcgtcaaagctggctgttgctgtagtgctgtcccgcaagaaagtcatcgccaaccagaaaggcgcaataacagaatcacttgatgtcgtgtgcatacggttgacaatcgatcgagtgatctcatttccagactcagacaaattcaatctagtaatcattgactgtagatctttgagagtttgttgctggctttggtgttccaaaatgatgggaggaaatagcttcgatctagcgtcggtgttgagcacctcccagttgaagctatcatccattgaggctaacggctggagagcattggtgtttcgcttgacaacggcaccgaggctatcacataggccggatgccaaaccgctggtaagcaaatctgatccagattgaacttgagataggacctgaaagaccgtggagatctgacgaagcccccactgcttagcaatctcatcgtttccttgcatgattcgagggaaagaagtgagccaggtatgcagagattcttttaaacaatccaatactgtggggtatgttgtggcaagatgagttacgttcttaaaggcttcattcgctccctcgtcctctttatctgccagaacaacaaccgtttcaatcatcataggcagagaatctgaaagtgtggtttggcactcttcaattaccatcagggagaggtctaggacggcagactgaacctctggccgttgatggcggcgaacttggataatactggccagcgcgagcttgatctgcgttgtggtggctttcagccaggcttcatccagagctatcttgtcgcttcgcagctcgggcggggagacttccaaggcgacacggtcgttgagaacagctcttaggagccccgagagaatctgcaaggaagtctggaggagcttgtatgacctgcgagtctgtgttgacggccttagaatcttagccagtgccgacacagtccggggcatgatgctggcaagcacaacgcggtccgtaactcgagcataaagtgcttgcaaagccttagcagctgccagggagatctcatctgatctatcatcgacaattccctctagcaggatatatactgtttggtcgacaaccgtcgccgtgccgatctcgtgataaattgtccgttctgggacaggcccttccaagaccgtaaatatagcaccgaggcagtcgaatccagcaatacacagttcttccggaaccttgggcttcggtagttgcttttcttccgtcttgttcggagatccccccacgatcaacgtcaacaggattatgagttgcttgcccatcgcaggagatagcctctgccgccatccatcggcgaccagtattcgcaaacagtggacagcggactctaagcatcgtgtgggtagtctttgtgtttcattgaagatatgcgacaatggaaagaatgcatattcagcgagcttctcgtcgagcgtattgttccccgcaagttcctttaaacagttgtgtaccggctcaagggctcggagtatgtcggcagcggaagcttgatttcctcggaaacggaggcccacggagctgagttcaatgcatggtgctcgaagctattcagaaatcagcattggtcgtcctaagagccgaagaagcatatcgtacctgcttgaaagattcctgccggaggttttccattgcagccgaacaaggtcggacggcgtcagagttgcaagaaagtaggctaagtgttgagtagtatcaaatcagtagtgcgccatggaacaccgtctagcagagccatcgtgatcgaactgcatccccaagctgcaccgctctgtcatctgccggcataataataaagcggtgagtgtaatctatcccaaacgggcaagatagcactgcacgtgatacgttagcgcgtctcaacgcgtgggaaacccgacagctgcctgcgacacagagtaactagccactgttgccttggctatttccattgcggttcttgtctgctcggggtatttattgagccgtatttcgtgcccatttgacttcgacagaaacttctatgcgggtgttgcgaattcgagagcttgcgctgttatcgctctcacgctcgcgaccaagcttctacatacgatctgcaggacaacacaattccttgaccacatcaattgccaagctatctacggtcttgttatatgccagtagtatagctcaccaaaatcctactttgaagaaaacagcatcctcacaaccgcgaatcatggccgatgacaagagcaggaaacaggctaccctggggtatgtacgggatggccagcaaacgattgggtgcgtcgacaatattcgatggcgcatgcgccctcttaatctgacctattttgactcttattttcattcactcggctaattcgttgtgtttgtcttgtaggaggttcttcggttcgggcgccaaccaaccgccgaaaaagcagaccacattagcttttggcggaaagagacaagcagcaagcagtaatgccgctgatactgagctcacggataacaccaatggatttaaggtggaggacgctagcaattcagcaccaactgcagagccaacgaagggcgtgaagcgggaaaaaagccccgaggcggaagaaagcgatggttctgatattcagcctgtctctaagaggcgacgaaaggcttcgtcgaagagctctcccgctgctaagaaacaatcggcatccccggagaagcctgagtctataaagccaaaagttgaatcgccatcaccaaaaccagcaatgaaaaagctctccgatgttactcctgaagagaagtcaccttcagtagtagaagacgaggacccactggaaagcgaagatgaagatgacctcaagccggagctcacgaggaaatcaatcgaaaagttccaagcaaaaatacaagccagtggtaaagatccatacccagactgggaagcaggcactcctgttccctatgctgcgttatgtaccacattctctctagtagagatgaccaggaagcgtttggaaatcacagaccattgttctcttttccttcgccaggttcttcgcctgacccctgccgatttcctacccactgttcaactgatgattaataaacttgctgccgattatgccggagttgaactgggcatcggggagtcactcatcatgaaagctattggtgaatgtaccggccgcagtcttgccgtcatcaaagccgatcaacgggaaatcggagacctgggactggtcgctgccaaaagtcggtcaaaccagcctaccatgttcaagcccaagcctttgactgttcggggtgtacacgaaggtcttcttggaattgccaaggtccagggtcatggatctcaggacaaaaagatttcaggcatcaagaaactgctgtctgcagccgatgccgacactgctggcaagggaggcaaaggggtggatatcaccaaggacaagggtggtcccagcgaagccaaatttatcgttcgctttttagaaggtaaactgagattgggactcgcagagaagacagttcttgtcgctgtctctcgggcagtccagattcacgaggctgagtcaaccggaaataaaattccttcgacagagcaaatggccgccggtgaaaacatcttcaaaactgtttacagcgagcttcctgcctatgaagtgatcattcctgccgttcttgagcatggtctctttaagttgcctgaagtgtgcaagctttctcccggaattcctatcaagcctatgcttgccaaaccgacaaagtctatcaccgaggtccttgaccgttttgaagggaaggaattcacttgcgaatacaagtacgatggagaaagagcacaaatccattttgtatctccagattctatgcaccagtatcctggagccttggaaacattgcagaaagacagcaaggggctgtcctcaatattttcccgcaactcggaagatctttcaaagaagtatcccgatgttttaggcaagcttggcacttgggtcaaagctgacgttaagagctttgttctggattgcgagactgtcgcatgggataccgaagccaaaaaggttcttccattccagcaactgatgacccgcaagcgcaaggatgtcaaagcggaagatgtcaaggtcaaggtctgcgtgtacgcctttgatctgcttttcttcaatggagaggtaagactattattctatttgatgtctatataagagcgattcgctggatcactcttcctctcttctccttcctcacgattcggtgttctttcgcgtttatggtgaggatgatgagagagaaaggaggcacaccgagtcgctttgggctacatttctagttattctcgctaacttttcgacagccctgcgtcaagaagtctctacgagaaaggcgagagcttatgcatgagtgcttccaaccgattgagggggagttccagtttgcccagtatggcaactctaatgttctcgatgagatccaagaattgctcgaggctagtgttaaggcatcttgtgaaggtcttatggtgaagatgctagacacagcagagagtggctacgagccaagcaagcggagccgcaactggctgaaggtatggtgcctctgtttgttggttatttcaaccgtgctaacttatacaaaggtcaaaaaagattacctcgccggtgttggtgactctcttgatcttgttgtactcggggcctactatggtcgtggaaagcgtacttcggtttacggtgctttccttctcgctgcctacaaccccaacaacgacacatatgagactatctgtaacatcggcactggcttctctgaggtgctacttgaagagctacatcagacgttagttcctctggtaattgaccgcccaaagccattttacactcactcggccgtccccaaggaccaaccggatgtttggtttgagccaagactggtgtgggaagtcaaaactgcggatttgaccctcagcccacgctaccaagccgctgccgatgagttccaaggaacaaccggaggtggaaagggtgtatctctgcgtttcccgcgatatatgaaatcccgcgacgataagaagccagacgaggctactaccacccgtgccgtggcagagatgtatcggaaacaagaagcagtcaccaaggacactactagcaagggaggtgtggatgatgactttgaatattgaaacgatattgtcagacgcactatagcgaatgtagttaaattcatttggtattgatattaaggccttgacaagtcgtacgcattttctagaatggcaccattgcttagatgggtgcatcatcacggggcaatgacaactggttggcaccaatttatcaattcacttttaatccaactattcctttctaagacaaagcccctgctgatcggcatccaatatcatgactttattctacaggtaatcccggctatcagcgggctatcagcggactccgcgatgcttggcgctgcaagccaagcagccggaccctgctcgggccctgagtcgacctgcgcccgcctttctttgtccgcagcacgtcttgccagtgccttggaagtaactgatagcacgaaataacatcatgcatatctttcttggcaccgaggaatgtaacatgcccccctcgacgctccgccatggctactactagctcacaacgcgtgtggagtcgcaacacttatatttcagtgtcggtccggaatgcagcccatctggctctctgcacatttttcttgggctgtgtggttacatacttcattgtcgatatgcgcgtgtttcaattgacgacggccattgggtcgatcatcgtttctgcggcagctcttactcccgagtcagtgctggtctcgcccgattcattcgttgtacctattggttggtagctgattttttttttgtagacagcttatcgcggctccaagacgcggtgaggctattcccaacccatcaggggtaagttgcacaattgtatgtagatatcgacaatgttattgacctaacataggaagttgcactcttttccacctctgaatactccttcgagacccatgctacatcgtcatggtggagtctgctggatctggagactgggaaagtgacacagcttaccaatgacagcaatgtctccgaattgatttggctagggtctactgactcgggtctcttatatatcaacggcacgaacgccgagattcccggaggtaccgagatttgggtgtcagatacctctaatttcgccaactcgtgggtttgtctatgacatgtttgaatgaaacgttaataacttctgtgcagtgcctacaaggcagcttcactgccggcgccgctttctggcctcaagacggccattaccaagtctggagatattaacttcttggtgtatggagagtcctactctaatggcactgcgtacaatgcagagcttgctgccacgcccctaagctcggcgcgtatctacgatagtatttacgtccgccactgggatacctggctcacgacgagattcaatgctatcttctcggggactctgaagaagaaacgagccggacacggagcgacatcccgctacatctctagtggatctctcaagaacctcgtcgcaggagtgaagaatcttgagtcaccctacccaccattcggcgattcatctgactatgacatctccgctaacgggaaattggttgcattcaagagcaaggcgcctgaattgccacgtgcaaacaacactgcttcatatatctatcttgtgccccatgatggatctaaaaaggccgtggctattaacggtccaaacagtcctggtacaccgaacgacatcaagggtgattcgagtagtcctgtcttttccccagatggccgtcacattgcatatctccaaatggaagacatctcctacgagtcggaccgtcgcattgtctacgtttataccattggctccaagaatactattcgtacattggccaggaattgggaccggtctcctggtgcaataaagtggactgctgatggtgaaaacctagttctgaacaccgaggactctgcacgttctcggcttttcttgctgcccgccaatgctggtagtgatttcgagccgaagaacttcaccgacggtggcgcagtggctgcttactatggcctgcctaatggagactatttggtttctagttccgctatctatactagccgcacagtttataccgcgaagcctggcaaaggtatcacgggtgttatcttctccgccaatgaagttgacccggccctgaagagccttggtcaatcagacgttgatgagttctactataggggcaactggacagatgtaagtctaccgttttttcatggaactgaagagatattaacattgtagattcattcctggatcatctatccctcgaactttgacaagtcgaagtcttacccgcttctattctttattcacggtggtcctcaaggttcatggggtgactcctggagcactcggtggaactacaaggtcttcgccgaccaaggatatgtggttgtcgcgcccaatccgactggtagcactggatttggtgataaacttacagatgcgatcgcgaacaattggggtatgccattctcatcactcattttcattctcgccttctaatgatcaacaggcagctacccttacgatgacttggttaaatgttgggagtatgtccgggacaacttcgactttattgataccgaccgcggagtggcagctggcgccagctacggtggcttcatgatcaactggatccagggtaatcccctaggtcgcgagttcaaggcactggctagtcacgatggcacatttgtcgccgacgcaaagatctcgactgaggaattatggtttatggagcatgaggtatgtatcttattcgtggtattttcattgttcttatgctaactcttcaaaagttcaatggcacgttctgggacaaccgagacaactaccgtcgatgggatccatcggctccagagcacattaagcaattcgccaccccacagctcattatccacagtgatttggactatcgacttcccatctctgagggtctggcactgttcaatgtcttgcaggagcgaggtgttccaagccggctgcttagtttccccgatgaaaatcattggtaagtataatggagacctttgggtggatgggatgtatcatcgcagagtcatagaactaattatattgcattcaaatagggtcatcaacaaggaaaatagtctcgtctggcatcaacaggtcttgggatggctcaatcagtactctgggattcgcacccctggcgctgtcagtttgaatgacacagaaatccctgttgtggattataatcctcagttttaggctcgtttgctgcaaacgacggccttctgcatgccatgtctcagatggcttgtttcgtagctatctcttttttcgcagttctatgctgtgtccaacttctatacatgaacaatggaatcatcacaatataacctctttttttcttatgccttgtgttctacctcgtggaatctgccggttactagcagcgaatatagaaaatccccagttgcctacaaacggctctcaccgtagcaaacgaaatacccctcaaaagcatccttctcccacaaaatttcgtcttctttgctatctctgagtttcatcaaaatcctttcctacttatcaaccatcatgcctcccaaaccttccacccgtaagggcgtcaagaagggtatgtcccatgctttgtcccctcatctatcatcatcgcccattagaaataagcaaaaacgcatacactcggctatcctagagagagctaacaaaagctccctgtcagaaatgcctaagacggagccctctactggaacccattccccaagtgagtactggaatcagcttacagaccttcaactggctttcttcgatgatgctacacaattcagggtttctaatccttacgtctttggtacagagatcaaagctgaggtgtcttctcccactcccgcttttttcgccaatgatgggaacgagagtgagtacaattttgacatgactcctgtctcaggcccaatctcgtacctactgccatataccgaggattattttaccttatgtcatgctcccactgccgatgccactggctaccctatctttgtttcccgaaatggccgctgggactggttttatctaacaacaagactacagagtctcccgctatccccgccaatgatacaacgaacttgaatacaaggaacacaaaaagtgagtttctcgataatctcagtcttttcccaaatctatttagatgtactaagggcgacttcaccttgtatccttatcccaagcctggtctcaattccgccaacactcccacgttctcttctcaaaacggatgttgggaatagatctttctcctatctaacacggatacagagtcgtcccctctcagtgtcaaaatggaggatatccccgaggccaatccgaggatccagcgaccgagcaatcccgtctccagcacattctctgacaacctgggccacttgatcttcacacgcggtgtccccgacagcgacgatgatatctcatcggtaccctcgctagttgaaaacatagccgagcaagccaggaccgcgaagcatgtggggttcttcatgaacacttcccacaacaaacacttcatccccattgaagtaccctccctccttggaaacgagaactgggaatactggttggccgccatgctcttactcttccgccaacactcggtgtggcctattgtgactgcggagcttcagccactatcccctagtcacaatctgtacctatggtaccagcgcatgcgcgattgtgcaatcgagctaatatatgccaacgtctccgaggaggttcgcaagactccttgtttcatcagcaccgtgcacgacgatgatccgaatgttttgatgcgccacctgtacgctcactatgcctcacctgattcggatcactctgatgacgagtctgagcttgattagtgtagtgattggtgtttggcaagaattttcgtgttttccactgctccagggttccctgatatctaagcaagggaatattttgcccgtttcatccaaatctttcaatatctgatgtttggtgctattttatttgcaggtacaactttttgtcttaatagattatttagtggttttcctattgctagttcagtgttcttctactacattcataagtgcgaattacacgaaatttggaagcagtacagacattctctcagcaatgacaatagtagtgggcattaccgttcaattcaatggagttctagtagtaagtgtgtatataagaagaacccccaagaaaagctctagggtgtacttgatgatgcttccctttgccttcatatatcgaaatttttttctacgtctgtgtctatctacctttctctaacaagacaaatgattatgaacttacaatatgatatatatttatgggaaaccatagcacgacatcccaaatcccgatctagaacccatttagattcttctgcgctgtaataacatcccccttatccacaaagtccactagcagcacattcggcgcattcccatacaacttagcgcatagtcccgcctgagcaccaatactcccaggcccggttgcagtattagtagtgtctgccttgtggcgagctggaatctttatgccgaaaatatcgacatcaaggaagtggttgacaatgcccatacggcctgtagcagcggtatcagagggtcggtcgatgctgcagtttgagaaaaaggagtctgtgacgtcataggctgtctcgaagtagtaggcgaactcgtcttgaatgaagttcacttttgtagtatcagcaccgtagtctgaaaattgttagtcgaggtatagcctatctctttgtgattggtgctttttacccaggaataccaccaatctctttcctctggatatcatgtcacccagtgtgggccagtctgatattaatagcggatttgcgaagggaacgtaggcgtagttatcaatcccgctgccggagaaagtgtctccaaattcggtgattgctattgagtcgccgttcgtcaagagaagactaacaacttcattcgggtttgtatccagccagttttttatagtcgtcaagaatgatttgagtgttcctgcatcttcgagcaagcatgaggtatggcacagctctatgatgttcccgtcaaggatggagcggtgtgtttgcacttgcagataccggattcccatgtcaagttgggcttttatatcgatgttttggttctgctggggtaagggtccgacaaaggcagagtcgtgggagcctacgaatgtgatattcgagtaggaccgggtgcagtactctgagcggccattacaggttgtcacagctaggtttgacatcgaaggagtggtcgaggagattactgaaggctcagatgctcgcggtactagtattcctggttctgacactgcaagcacaggctgaagtagcaagagagtactcagcattgtacatctcaatttctggtggattttggtcatcgtgttcaaggtcgctttggactatacttgactctgagcgagaaggcgcgctgtttcgccttttattccaagacttctttcttgtcttagcagacaccgtgattcataactactgtccccggtcatgcaggagcaacagctgcccccgcgagatgattatcagctgcccctgcaaaagtggtatgctcatgcctattcctacatacactccacatgccggtccatgaccaaacgagaaccctaaagcaaaaagaaaagaaaccgaaactgactataatcacgtcgatacctccagtgatagagtagcagaacatgaccataaatatcccagtctcctcgtgaccgcagtcatgcaccaataaacggccccagcgtgtgcgccagatatttgatcttagagaattctctgtaaacacaagcgatttgagatatgacaggaaacttgttacattatatctcgctaatacctgctttacaggtaagggtaggttcagacgatagtacgacagacttcagtacacatcgataatcgctgcttggatgggactggcctcattgcataatcgatggaaattagatacctgtaaagataatatcgaggttcatagtcattaacataggccaatgctcgatgatttatatggtgttgcgaagagcaaatatcccacgttatactataactaccccgtcacattcagaattaattaattcatttatagtcttcgacatacctttggcactactgagtctttccttcttctcgtttttattcttaccagtctgacacatttgcttcccgatatcggattcagcgccatcaggctgtgctagatagccacacaacgtttccccttgaacatacaaatggccattggcaaatcgaattaagttatgtgcctttgaagattacatggtattatgctgtttgtctttttgggcccttcatatcgtatcactgtcttaacaccgcttgttgggaatcgccgattgacgtgatgttgtagagaatcagagattatgttcatgcagtactccgcacggagtaccgatcaggttcaattgtaatagaaattatctcatcatgcagatgtacaggaaagctagaatgcactagcacataattagagatgttcaccgtggaaaatattcgaagggcactagacgtacgtcggggtatatcggcaatgctatcgcggtcgcccaaagcatgtgtgatggctcttcgcatcctccgtctgatgccttacaaaatattcatgtgccaaagcctctcagtttggtagggccgaaagatatctggcggacctgcaacgttgcccaggctcttcaagaagcatcgggacatatagacaagcagtatacacagggcgcgatcgcaacaatgccccgcgaacgtgattggggttcattcggacctgggtggggggtgaattttcttgtatctgatatcaaatcagcatcgccttatatgaactttgggccactcggggaccttcagttgttcgaccttcgtttcaatacagctgctggcttttgttggatactccctaaccttccgtcggattccgcgtcgtcatatccatgctggagattgagatggattttggaacgggcggcaacggagtatctatcgagggaccccctcttccagtgggcttcaactcctagtacaacctctagacacgccaaattctaggccagttgagctgttatttttcgggttatattagttagattttgacatattacgatatagggccagtttttgttttcaacgaatttatactcttttcgggaaagcttctgtgtttaagtactttacatactcttcatcagcatgtatgatgtgagataagcacgtgtatatgaaaggctatcaagcttgtgcataccccatatctgcttttcgtatgactataaaacagagaatcaagatagagactatagtaagatgttccatatatcggtcccaagcagtgtgaaaaaaggtgacacttatcaaaagagctaaatagccgtgataaaatacgagggcactcatttgtagctttcatattgagaaactctcgatatcttcaaggttggttcaatgttgcttgcacaaagatgtgtaaccaccttactactcaaatattcttcgacagttcaaggcagaaaattaccagagaatagattaaagatagagagtccatgtgtcagtgtttttttgactatcattgtccgtacaattgtgaaagcatgaaaagtacctggcagccacttgtggctggtgttcggcccctaagacgggcccgacccagacaacggagctctgaactttcattctccactgtgttcatacccccaagctcgacattccactccttctctctatattgtacctcataattcccctcctgttctccgaaataacattctgatcaattccacgatcgttctctcctaacacgctatcactgattcggcctcgtctccacctaggctgcataacggggagcaatggtcattcggagatttcgctcatgagctcgatggctgagggcagtgagggttggtcgcgcgaagacgagcttgacctaggccacgaaggcgatcaccgacaacccgaccatggtgccctcgatcaaacattaccttccccgcaggaaccagtggaagaggaattggacacgatagacgaagcggggaaccacgattccgagaaaatagcgggacataacgatttcccagaaacccctccgccgcgacacgcggactggaccgcgtcagggagcgcggatggaacagggtcaaaccccgacgattccccatcgctacatgttagtggtacaattggcgcataacctggatagctagctgattgacggcagggctctcttcagtcctctctggatagcagtgctctcgcgctccgcggatctccgcgagtcagcccaagcccggctcgtcgcccctttgaccttcgctttcagtcccgattatcttcatcgccgcaaagtttatctagagccggctcgccattcctagcgcatcttcactccagacagtcttcaataaccagccaggtctccccgaccccagaaacagaagccgaaccgctccaggggccttgggatgtggtgcgatggacaaagcttcggaaaatcactgggcaagcgttttctgaaatcgggaagcgcaatttcggacgaccaacttgccttgcagtctccacgtcgattgtaataggtacatccaagggtattattctcgtgtttgactatcagcaaagtctgaagactattattggaacgggcacaccaggtttgtcaaaagacgtgtacacctctggcgcattgtactgatgatttacctagctgttgaatgcggtgctgtcacatcactggcactttccgccgaccactctaccgttgcaggggggcatgactctggcgatatcttcacctgggagatttcgcgctcggcaaagcctttccttcatatcccgccaattccggccaatcaagtcgagactcgaatatccgatggccatctttcaggttctgcagtcattcatatcggctttctcggcaccaggcgaaccgcgctggtctcggctgacacacggggcatgtcgttctcacacctggcaacaagagggatgggtgcagtggggagaacagtcaagacgactcgaattctgggtcgatatcctcaggcaacggcagatatcatgcggcgtaagcctagctctgttcttgctttctctcctctgccactcggcaacgtagagcaatccactgattcgttgggcctcgttgctatgctgacaccctatcttcttgttattgtgtccaccacacccgtggcacaaacccaacacaaagcaccgagaccaaaggaagttcccgctcacagtgccatgaccggcgccttggcatggtttccggcaattcgactgaagggcaaagacacccaaacttcaaacacaaaacttgtctactgctggtcaaatgtgctgaccgtgctcgaagtctcagaagccgagtcagacgaacctgcaaacaaggacaaaccccccagtcttgtcttcagagcgcgcagcagatggagagcagatgaagccattgtggctgttcagtggctcagtcgctcggtactcgcagtcttcacaataacgcagcggctgctaattatcgaggattattccatgcatgtgaccgactcggtcgatctcgccaacagacatatatatcacaccgatctcttctcgtcgcaactccattcactggttgaacagtttgacgaagaggacgagtcgatgcacggagtggtagcagatgcattccatatgagttttcgttcttataaagggcgcttgttcttgcttggttataatgaagccttggtgggcaatctctcaaattgggccgatcgcttgctggcgcttatggaggctggtgacttcattggggccattcgactagcaacctcgtactatacgggagagtcagaaaagctgacggttgggcttcctgaagaggatgttttgagacagcccattgtgcaagaaaggcttttggaaatgatttccgcctccctcaagtatgcttttggtcgaaattacgaagcaagcaacggccgactggagaaccagcagctagaggagctagccgatgtttctatcgcggcttgtatctacatggctgacgaagagttcctctgggaagaagtcttcaactggtatgaggagcaagattcggcgggcattttcctggatgcactcgaaccgcgtatcattgatgggactctgcgatcactacccccgaccgcggtcaaggccttgatcaaccatttcattggaactcactcgaccggtcgattggaggagatcatctgccttcttgacacgactacgatggacatcgatcaagtcacaacgctgtgtaagcagcacaatctttacgacgcctttatatatgtatggaaccgctgtctaatggattatgtgggtcccctagaagagctactacatctgattccctcacaatccgagcccttggccaacggcgactatgtgattgaaatgagacggcagaacaatgcgatgaaaatgttcccctatttgtcatttatcttaacgggtcgcatctatcccaccggtgaggacatggatgaggctgaagccatgcgagccaaaacagatttgtaccaattcctcttctcgggtcgtgcgtccggtacggtacctagagacaccagcggggcagactccttctctcaacttcgagccatgctcaagtttgacgcttccagcttcatgagcatgctcaatgaagcattcgaggatagcttcctaaatgagcccgagagcgaggatgtctccgcgtccggcatgttaatcaatcgacagtacctcatcagcattttgctccaagtcatgaccgccgattttttcacgccttttgataccatataccttgatatgtttgttgcgcgcaatctgccaaaatatccacagtatattctcctttctggcacaactctccaccaggttctggtccgtgtatgccaatatcccgatcaggaaatggcagacgattgcgaattgagtgcagaatatctgctgtctttttaccacccaccggacatccagagcatgattcctctattcaaggaggcacgattcttccggattctcaagtcggtctaccgtctagagaagcaatatcctctgttggtcatgacttacctagaggatccaagtgatcgcgatgctatcttcacttgtctgcatgactgcctccgtccaggctctgggcttggaaaaaaacagagacgcggtatcgtggatgtggtcaaggagcatgcccgggagatcgcttcgattgacgtgacgcacgctgcacagacgatgcaagacctggcccctgaaacacactctacgtttttgcgggttttgcaagatgatccccagcaacagtaccagtacttgctggtgctcatcgagccgcaggctcagaccgcggacacccaatcttcgcccaatattgagaactggatgatcgagcgatatgtgcagctcttgtgcaaatataacccctctcatgtggcggacttcgtcgacggattgcgagtcggtgacatccgcttagatgaactactcccgtttattgaggaaagcggagctatcgatgctgccgtcattctcctcgcccgacagggtcaagtccgcgaggcccttgaccgtcttgtcgcacacctgaacaccctcgaatccggtctggtaggcatcctccagagcgtgcgcgagagccccgactcagcgactaccgccgaggcaatcgacgacctcatggagtctctgaacaagtatgcaggtgtcggaacgtggctctgtcagggccaaagtaagacagtcaagcagtcgcgcacaagcagcgccaacggcaaacgcaacgcgccaactctcgatcaacctctaacgtttgaagaactcctttggctcgaccacattgaagccgttgtgcgcatcgcaagcaacgtcttcgccttcatacaaggaaacaacccccaaatagcccttcccacccaaccaaccacatccctcaccggcgaaagcggccgcctaacaacctcattccgcaccctcgtccagcaagtcttcacagctctcctagcaagcacagtaaaaagcagcccagccacaaccgaaagaacagacatgtccttcttacgcatcctgcgcgcattcctgagtcgcgccgcaacctggtcgccctcactcctcgagctgcgcgccgtgctagcatccatcttttccgcctactcttacgagaaatccctgctgaccctcgcaaacggcatgttggaccgcgacctcttcgtccacgtcgacgaagtcacccgtctacgccagcacggctggcggccccgtggccacacctgcgagctctgccgccgtcgcatctggggcccgagtgttggtgacgcgcattggtccgcatgggaagcgcgacgcgccgatgcctattcccaccgcatcgcgagacgcaatgaggatagctatgacccgtccgagcgcgggaagggcaaggctgctgatgtcggagtcggccatccgtcccgtctggatgcggggcgtgcgcatgcgcatactcatagcgctcgcgctggtggtatctccgatgcgaatgctgaccatgatcgtgaccatgaccacgaccacgccgaggatggagctggatctagcaccgtgactacagtcatagccagtaccccagaacccattgtgattttcgcctgtcgacacctctaccaccgacgctgcgtgctggacgccgtcagcgcgggggcccgacccgctgaaaccgcgtttcggcgcgaccatttgcccgactggtcaggggccgagctgttctgcccagcctgtacatagttttcgggggacaccgggaatgattatttcctttgtgtctaggggtattcttttgttactttttttttctatctctttgtttttgcctactttagatgctgttcggggaatatccctagatgaggatcatcttgtcttgcatatagccattctccttctttttatcccccactctttgtaactcccaactgaccgtaatataatgtgctattaaagccaggtctatccctgtcatagtcatccgtgctagtcttgtctgtcttccgtcggaacaggtgatacgaatggtgatgttctttgcttcagctgttcagctcatttcccacatgcgctcagctgtactctcaatgtgatcgaataaaaatttctactctgattattgttcggtcccgctgcaggggttcgcgggaacactgatatggcacggcttttcttccaggtggattctatgattgtgttattttgatccagagggtccaatgctctttgcttttggtagtgatctacaatagatggtgtatagggccgggatgaatcttggaatgacactgtcattttactgctgtgtttgatatcagttttgggtaggatctccgtgagcactgatcatgtaccgggggatacatgaaaatatgtacttccactggtatatctgtatgtgttggtacttgtgtctaagtacctcaaaatggccagagagacctggtgatgttcacgaattccacctgagtccgccacttcatttttaattcctcagattctcgatctgactcttcacttgctgaagaattgcctgacaaaaattcccggtaacaaagaaagaaaagcccaaaaaggcttgatggccgagagtcttcaaacagctgttgacctatcatcttccttctcttccctttactactacatatgcaaaccttagatgttggcggtactcactctgattggtcgtggatagttacattactggtttgatctatatgtctctcctttctttctccaaatccgaaacatttaaggttggtgtttagcgcttgagatatccatggatccgatacggttgaaggtgaatacactactatattgtgtacccgtgaacattgtacgttgttgcttgctatcctaccctgaatgtcaatctgagcacattacagaatagaccggttcaatcggcaagatcgaaatgatctactgacagcattgatacagggctcggaggtgtcagactgattagatgtttcaacatgccccctttaaccgcatatcttcgattagagtgtctggtggatgtatcacgctgctccattcttttttctgtttttcttttttcttttttcctgtttaccattttcttcctggggagagtggaggcgtctgaagtataaaggtggtccctctccctgtataaagcatcgatcaatctgtagtccattgtgcatgttattgtgcctaggcctattgtccctctctattgtgattttgtattcattcctttccttctattgtttcttgccattgtgatcagtatctgggatactagatctttcccagtctttgacagactctctctttccaatccctctttctcctcacaaacatcctacaaaccccctatcatttaagcataatgcagctattctcagcccttctgcccactgtgggcttgttagcgcaggtatcttccgctgcatacaccctacgcgatgactatggtaccaccgactcgttttttgacaagttcaacttctacacggtatgtctatcagcattggtcccgactttttgcctcataataaactcatcttatatataggacactgaccccactaatggttttgtgagctatgtcgaccggaacaccgcatcgggcaatggtctcctcgacacgagcaacggcatctacatcggcgttgaccactccaacaccgccagtacgcctggccgccagagcgtccgcctggaaagtaccactacctacaaacatggtcttgttattctcgatctggcacatatgcctagcagcacatgtggcacctggcccgccttgtgagaaccccagccgcaatccctttttattaatcagacaaggaaataagaaaaagaaaatcgctaacaccctccagctggatgctcggttctaactggcccaataacggcgaaatcgacataatcgaaggcgtaaatgagcaaacccaaaatcaaatggccctgcacaccagcgacggctgcactatcaacaacggcggcttcacaggaaccctcgacacagcgaactgttacgtccaagccagcggccaatcctcaaatagtggctgctcaatccaaagcgacagcacccagtcctacggcacaggcttcaacaacgttggaggcggcgtctacgccaccgaatggaccggctccgccatatcagtctggttcttcccctccaacgccgtgccggctgatatttcatcgggaactccaaacccggcgggctggggcacgcccacagcactcttttccggtggctgcgacatcgactcgcatttcaacgatctgcagatcgtgttcgatattaccttctgtggagactgggcgggctcggtttggggttcgtcgagttgtgccagttatgccgcatcgtgtgtcgacttcgtacagaataatcccacggctttccaggagacatactggagtgtgcggtcgcttaaggtatatcaggacttgactagctccacgagtggtgctgagggtgacgatgaggaggtggatgctgattggaattctacggcgtcgtacgagcgctctgtgcctaggagttctatgaggcatcgccggcagcccaatcatcataggcatggccatgcttagatgctgatgctgatggatggattgttttctgcgttgaaagtgatatgggttcgatctgttttgcatttcgatagtgatcttcgattgtaaatatcccctttttttcagcctgtttcttgattttcgttcatcttacggtctctttactcgtccgggctccgatggtctgtgctggtccacagctgtgggaggacgagcacatttgataggctttattctttattctttatgatgactttatgaatatctcttccatcttgatgatggaatgaaaatgggcaataacaatcatgagcatggttatgctctgtatatatttcttctgagctgtaagtgctgagcagactacgattgatatacaagacaagaatatatacttgaatatatgtaccaactaatagtcatattaacattaagattaacctcacgccccaaacccaagaacatcgcgttgatcatccgtaagccgaccccactccaaaagcaaccggaagaagtagatctccatatcctccttcctcaacgccgtattcgcccacttccgcccttcctccgcaatccacttcccctgctgatcatgcgccttcatgcgcatcttcaggggcgcattaggatcactctcctcggatgcggcagcaggcacgcccgcaaagtatgcaagcgtactccacaggccatggagacggatatcgacaggcacaaagtgcatccatgaggttatacgggagtcgaaccactggcggaacaggcccgttttaaggggcaggctgtggctgtgtaggaaggggaggaagcggccgctgaagcctgcgccatcgaggtcgaagaggaagcggtgcgaccagtgtgcttggaagtctgcccagcctgcggtgcccagctctgcagcttgttcgtcgcagtcgccgcagcggacgattgggtcggcgaggtggacagcggtttggagatgtagctctgcagccggggcgctgccgtccattgtctcgtattggaaggagttctcatttgagtctgctgggaggaggacggagacttggttgttggtgttattgttgattagatgggcgaagcgctggcgtggcatgcctttccattcaccgaagcggctgacgccttctgatgtactgccgagccagtatagagagttctctttctggccatagtccagatccgggtattcgtctgtcggttgatatttcaccttgtcgatgtagttccatgggcttgggaagaggatgtcgttgaacccggtgagagcactttggctgaataccggaatgagttcctgagacaccttgaaggaggccggggagattaggagaccatggaggaaggcaaggtcaggttggtggcagatttcggaggcgaggttgaaatctagggggaattgacccatggaatggggagccacgcatgagagacatatatcacgacggttccagattcgctgagagcgcaccttcgatgacggcgggcagacagcgctcacataagggtcgaaaacacccctccacgctccgtcagtgaatacggtaatgttggtttgatcggccggttcaatcgggtcccagccctcctctcggttgttcgaccatgtctgcaccatgcgctctttggggatcattgcttgcatcccagtctgccggttcagcatcgatattttctcccagggaactgcaacacggggttcatcgttcagattgaataccaagtccatatccgggagatatttggtaaaattcttcatcatgtccgcggcacccgccaccatccacgcatgggtcggttttatgccttcttgcaccatggccgtgccgttgcgaattctgatcccaccgagatcgttgaaagggtttgtggctagctcgtgtgtcattgcacggatgtgctccggagccagggctcgaaagggaagtagatcatggtatatctgatcgaaatcatcgatgataactgacgattgggcagtggcatattgataccattcaccaaagcccctagacaaagattagttgagttgtgcacatgggtattcaaaacttacggtggtggatgctgattatatcgcctctggtattcggtgacagcgtcgccaagagtcttgcttctagacgcctgagcgagatagttgtgatgatgaattccaccatcctttatgaggaactcaatcgggtgtatattatcaaggcgatgctttctcactgcaaaaacgagactgatcccacatagcacggcaaacaatatttgtatggcaacgttggtgcgatataatttcggctcttcgtcatgaaccactcgcgtaagaagaaacaagagggtacctgttaaagatgccgccaacgggagaacagcatgagttagagagataaatgggaagggtgattgtccagtgagagccgataaagaggaaaagtatacgatcatgaaaccgcctataattgacaccccaaggatgtcgaaatgcggcaactaaagaaatcagtattggcagagatgagtatagataattgggaggaccaacaatatgccaggcagacaataccagtattacaaccaacacagactggctgaaagcgccgcgcgaatactctagatccaacattggttgacctgcaagttcaggcgagctatccggtacccagatggatataatactccagaccaaagaaagaccctagaaagatcatcagaaaaaatactccccacacgatcgtactcgtctgcttaccaagagaccagctccaaggaacgttaaagttcgttttctgcgcgcatcatcaaattgagtgccaatccgacatagcttggtaataccgataagtataacagaatcagcaaagaggttgaacagcctatatgatcgtaggtgcgatgcgccatttgatacaataggacagatataggttgaccgggttccagccgagaacgatgaagccaagagcccaccagtcgacaagaatgcggctgcaattaagcctctgaagcggctttgcgtgagataatagaagctccggcgtgaaatggagtatatcacctgtagcggcggcttgtcgaatcgctgggtggggacatatctgtccacttgtcgcgatcgatggttgcgccagtagtcatagagcgaaataacgaaaggaatagtgtactattcatgacgccgtattagtcgcatgagaaattgaatgataaacaatgtattcagccacttacagcgtatccagcaggcgcgcattcagtgtttcgagttacttggcggaaagactcgattcgcaagccacacaaccccaataagagaccgagctttatccaccacgattggacccgtagccgagggcgagtctcgacatcacccagtacaaaagatgaggttgagacgcgggaaggaagctcaaattgttccgcgagagggataacaggccgtttacttgtcggcgaggatggcgccgaccccaatgagatgaaccgactccataccaaaatagtggcccccgtaaggaaacacaccagaactgatgtactaatggggcgatctataccggcgcaacagtcagatcaagttgtaagacattgatatccacggcgacgactcaccaaaagcgtatgtggtattataggaggtaataaggaatagcgagcttaaaagaaatatgctgcccatataatgcgatcatgagcctaagtctccaacaatgtgagatagcttgctagatactcaccccacacagaccttcaacccgaggtcggaagataactggatcatattgcgccaatcagtttatgatcgttctaaagcgtcccaggccatttctgtgagtccaagaattaattgaacagttgagaggtgacaagacaaagacacctcctgtagatcttcaggagattgacagtgttcgaaacatggaaagaaaaagcagggtaaggagggccaagagggccctttgatccactggcggctaatcagaggcaatccggagtgctgatccattagggttgcgtcaacggacgggttatgatgtatttcacggttggaccttttactgcgcatgtaacgatgggccctgccttgcattgcttgtattctaataaggtatcttgccaatgagtggtggaacatctccagccactatgctcaaatctgttagctcctggtggttagctggtttttacccggagatacattgtattgcaaaagcaggtcagcaagaaatgccgagccattcagcggccagaatcaagccttggtcaacttcacgacccacttgagtcctgagcgtcatgtcgcttgtgcgaccttccaatgcataagctgttgtacttcgtacatcatgttcggctttctaggcagatcctgcaagcagctgtcctatacatcgatgtacttgacgaaggtacacacagccaaggactagaacacgcgtcatattagccaagaacctgtttgttgtaccctgtcggctccattcgcatgtggtgaaataaagatggcccaggcgacccatggttagcgccaaaagagcactcaattaaatttgactaagctcaaagcagttcgtggatttcctagctggatactccacgtcatccatagccacgtgatctgataagggtccaggcggtccactgtctatccaatgaaatgtaaccgcggctagtccgtttcgagcattcgacctcaacatagagtatcccacgtgacttcccaaccccgcaagaccaatcatatgtacatactaaaggccatccgtataacctcttataagggaccttagaaaaatggctttcttattaagcgtctttgttgtatattctcattgactacaacatatgttgtatatgcccgaaaggacgcagggctggtctgcagagctcatcagatatataccgcctacttctttggggtgaccctggcaaatcacagccacgtgacaggatatacttatataatcaagatggaggcggtgtatacctcgggcggtatcagagagcagtatcatttttttagccgctgggaagttttttttggtcgcaagacgaagctaggtgttttttccaatcaacactactcctgaatcgccatgccccgcaaggcgattgactcgcggattcccgctcttattcggaatggtgtgcaggagaagaagcgcagcttcttcgtggttgttggcgaccatgccaaagatgtgatcgtgcatcttcactatatcatgtccagcgtggacgtgaagcagaacaaatcagtactttgggcgtacaagaaagaccttcttggctttacgagtcaccggaagaagcgcgaaatgaagattaagaaggaggtcaagcgtggcattcgcgaaccgaaccaagaagacccattcgaacttttcatcaccctcaaccagatccgctatgtatactacaaggaaaccgagaagattttgggtaacacctatggcatgtgtgtgttacaggacttcgaggccatgactcccaatttgcttgcacgaaccgtcgagaccgtcgagggtggaggtttggtcatcctgcttttgaagagcatgaccagtttgaagcaactttataccatgtccatggatattcactcgcgataccgaacagaagcacacgatgatgttgtagctcgattcaacgagcgattcatcctgtccctcggaagctgcgattcgtgtctggtggtcgacgacgagttgaacgtgttgcccatctccggcggcaagaccgtgaagcccctcccggcccccgaaacaacggacgagtcagcttttggcacgaagaaggaattgaaggaaatcaaggagagcttggcagactcgaagcccgtgggccctctgctcaacttggctcgcaccgtggatcaagcgaaggcgcttctgacctttgttgatgcaatcgctgaaaagacgctgaagagcactgttacactgactgccggtcgtggacgaggaaagtccgccgctctcggtgtcgccatcgccgcggctgtcgctcacggctacagcaacatcttcatcacttctcccagtccagagaacttgaagacactcttcgagttcattttcaagggctttgatgcacttggatatctcgaccatgttgactacaccatcttgcagtcgacaaatcccgacttcaacaaggctgtcgtgcgcgtgaacattcaccgcaatcaccgtcaaaccatccagtacatccagcctcaggatgcgcaagtcttaggacaggcagagcttctcgttatcgatgaggctgcagctatccctctaccattggtgcgcaagctgatggggccttacctggtgttcatgtcctccactattaatggatacgaaggtacgggccggtccctatctctgaagttgattcagcaactgcgggaacaatctcgaagtggagtcaagacagacgacaccgacgtcgccgaccgcagcacaggcaagtcagccaagggtgccgacaagaacctgagcggccgaaccttgagagaaatcactcttacagagcccattcgatatgccccaggtgattctgtcgagaaatggctgaataaggtcctctgccttgacgcaactcttcccaagtcgcacatgaacacacaaggctgccctcacccctcgcagtgccagctgcttcaggtcaaccgtgataccctattctccttccaccctgtctccgagaagttcttgcagcagatgatggcgctctatgttgccagtcattacaagaacacacctaacgaccttcagcttatgagtgacgcacccgctcatcaactctatgtgctcgtcccgcctattgatgagggggccaccaagcttcccgagccactttgcgtcattcaggtcgctctcgagggtcgcatcagtcgccaaagtgttctcaacagtttgagccgtggccagcgtgcaggaggtgatctcattccctggttggtcagccagcagttccaggatgagaacttcgccagtctctcgggtgctcgtgttgtccgtatagcgactaaccccgagtatgtgggtatgggatacggttcccgagctatggagcttctggtcgacttcttcgagggcaagttcaccaatttggaggaggaggccactaccgccgaagagcaaatggtccgtgttacggacgaagagctcgccggttctagcctcttggatgacaacgtccatgtccgagacattcgctccatgcccccgctattcggcaagctgaccgaacgtcgccctgatgtccttgactacattggtgtcagctacggtcttaccccatccctccacaagttctggaagcgcggttcttttgtcccggtgtatcttcgtcagacccccaacgatctcacaggagagcactcttgcgtgatggttcgcaccctctccactggcgagactgacgacgcctggttgagcgcctacgcgcgcgacttccacaagcgattcctctctctgatgtcctaccaattcgggcagttcccgtctgtcctctccctcagcatctgcgagtctgccaactccggtgccaagaaggacccgaagtttaagccgcgcgtgctacagaaatccgacctcgatgccgctttctcgccctttgatctcaagcgtctggatagctacgccaacaacctcttagactaccacgtcatcctggacctggtccctactctctccgactactactttggaaaccgtctcgatggcaaggtcagcctctccggcgtgcagcaatccattctcctcgccatcggtttgcagcacaagaacctcgacgaccttgagaaggagctgaacctcccctcctcccagctccttgctatgttcctcaagattgtccgcaagatttccacccacttccgcaatctcatcgagaacgatatcgagcaatctctgcccgcacagaaggttcgtatcgagacctctgccgctcacgacgatgagcccgaagtcaaccttcagcctctgcccatcagtctggaggatgagcttcttgaaggaggtaaacagatcgataaggagatgctcgccaaacagcgcgctctgagcgcatctaatccgtaagttttaatcgctttgtctgcctatcgaaacaacaataactgatttccagcccacagtgatggacctgacagttccaagtcctctaagcgcaagaaggtcgagactgcgcgcgatatatacgacaaggagattgactcgaagagacaaaagatgatcaagaagggcaccgagggccgcaaaaagcgctgaattatttgggttctgaccagttttctttttgcattaatgtacggtgttcggtttcttgggtctaaaaagacttgcttgtgtctagtatttgtctgtattcttcaaggttcatgttttcacaggatatccgtctcttgtacatacatatgaatcatgtttattatgcctacaatgagttgattgttcctagagatagacgtaatattccttaaccgcttgatacataagcttatgcgattcgctctcaaatttttgaatactagatagaggtcatcagactagcattgaccacttccggggactgagataatcacagctcatcatgctccacggcctgttcgtcggcctcaggcttaggttcagcatcagcttcgactgtctcagcatcaggttcaacctcagcttccgcctcaggcttaacctcagcctcatcactgaccacaataccctcaggcaacttctctttagcaccctcacccaaccgaatggcatcaacccaagactcaatagcgacagccccaaagtccgcatcggcgccactgaaccgacgccaccatccgcgacgcgcattcaacgcgataatttcaaccgtctggccgtcagctaacgccaatgcctcacgcagagtcttagacctggtgttgatagcagggacggcatagagcgggaagaggtgcgttccgcgctgggcgtgcttgtgaccgatctcagctaggcttgcgagcgcctcggtggcaggcgctggaagcgcggcgtcaggctcgctcgcctcagggagaatgactagcacacaggtgccggactttgatgcgagacaggctgagtcgagggattcgggggtagagagggttggaattgggggtgcggggatagggacttgaatcggcttggcggaggggtctgttgtgtcctggttctcggaggcggtgggtttgaggtcctcggcatcgtcgacgatggaggtaggcttggaagcgggcttggacttcggtttcgacttgggcttggagtcggacgcggagcggggggacgcgtcggggttgggtgttgccgcttggctcaggaattctgtgattggcttcttcttcaagtcgccggtgtagattttgtgctcagtatcagcgctggggacgaggacaagcgtcgggaactcggttacgccgaacttcttcacggaggcggattctttgttccgtacttgggcgatgtcaattgcaccgaggaagtcaactgccagagcacggatcagagcaccagttgtacccttctctgtgaagaggatggccttgggccggtcctcgttttgtccaagccatttgtccaagtccttgtctgttgcgcgcttcacgtggttggggatgcggtcgacgactgcgtcgacgatacctttcgcgctgcgcgcaccttggtagtcctcaacacggggcttcccgggcttcttggaaggtgtcactattttcaaggtcgggaagccctggacacccatctgtccgcagaaggctttgttttcgtcatcgtcgcagttgatcgcggcgacttttgcgagtccgtcaaggtttttcgcggctttttcgaatgcgggtttgaggttcttgcaatggccgcaccaaggcgcgtagaatctaagtggaaaaggtgagtgaaggtcggagggtggaggcagagagctagatagcttgagtgcgggagaagcttactcgacgatctatgcaactattagtcgattttgcgcatttaggaagaccataggcactcaccgaggtataattcgaatttgcaataagcgagttgtaggttttaggattcaactggatcaccggcgaattcttggtgtatagtccatcggcgttaacaggcaatgccgcaaggagcgacgtgacaagcaaaagactggcactgtgcagcataattggtgatttggcagcaggtatgaaactcagcaaagaagccaaagaagccaaagaggaataaagaaaagacagatggtccgaagtattaacgcaaggtgtcctgaagctcttggcatgcggaggattactaggtactccgtcctgaagatattcgagtagcaaatatctcactcaatatgcatgctgtatatatatcttgaattagtgtaatgatgtttcccatctcacattaactaggtcttcacgctgtttaaatgattccttcgattggcatccggtggacttgtacagaatcgtctccataagttccgagttccctttctcttcaataaacacaacctagcaatggctagaccaaaagagagccatggcctggccttcctaccccgcgaactcttctggatgattctaggctacttagaaccaaatgaactggtccgctgtcgccgcgtctcacgtgcctggaacgaagcctttagcaacccggccatcctactcgcactcctgaggaaacatttcccatggacaaaagaagtcaaaactttgagccaagagacatctcctgaagaacaagaacaaggtcgtcgtcttttcgaccaggttgcatcacgatacgactacctaaaacgaggaaaaccccgctctatccagaagtaccgcctctgcgatgactttggtggctctggagaccgtgaatggtatcaggtgcagccatgggagtcacacgccagtcatatgaggcgcttcattgaccgccagttctctgaggctttgtggactttcgaggatggcctgctagtctaccccagcgccgatcatcaattcctcgtgctcatggatttggaaacggaccggcagttcatggtaccgttcattattcgtggcaaaattgttcgtcgagtgcggctacagaagagcttgctcgtcgttgagtgggctgaaccaaaggcctttcactggctgaacgatagtgatggcgtgcatcgtcactttgcgtcttcctttgatgtgacgaggggtgaggaccagggctggaatattgtcccgcgcaatgaatggaagattatgtttttagggcatccgctgagcgagcgagatcggttcttctcctcgcatagcaacactcactatgtcatttatatatggcagccaaatcgcagcttgtataccgccgacgaagatgcacccattgagtctttgtttgtctgggacatatcgaaaccatcatcatatcgaccttcattggatcccactggacggctgagagacgactcacctgactctccatcaatcgtggcacgattcggattccgagacctggagttcttcgatatccggcaacgaggctgtccaagcattcaacgattggagattacggttgattcacaggcggtcgaaattacagaaaacgtttgcatctggccggaagacgaagcaccggagccatttggctttcctcggcctattactacaagcattcctctggtcggaaatgggcctcatcggcgccgggattttgacggaattctaccgccttaccgtgggaactgcagcatgctggcagagagtatgaggctagatgggtgcattatgacggacccttggtttggtgttattgctcacgtggctatactcgagcctgatcttggcttttgtcttcacttcgatccttggacgtgggtccaagatcagactatctatttgactatccagacacctcgctcgagcgtcacttgtgacaattgggatttcgtcggtagaggaaagctcgctggtagtgagaaatatctggtgggcgagaattgcaatcgagagctagtgatttaccggtttgatagatgaattgaaggacaagcggactgggccacttctgcggcctttctccttcacgacgcaatgaccctacaaatccgatgatataagaaacgttatatataagagcatacagacgtgattttggaagttctttttagatgtctttagatgcagtacagtgacttttctatatataaccagggattggttttcgtcaattcacctctgctttctcaaaggctatattgatctccttgcgtatctatcatatacctctctcactatttcgtcggtttaatggcaaccgtactgaaccgaattttacaccgtaccaatctatgggtactaggtagaggaagcgattatttatgacacagttgtcttcctctccttattatacaacagctggacgcaatacccaagaagtgcaaagaatttgagctagcctaggggatacacggcctcaatgctatggaatcatagatttgggtatgaacttgtccctgattctggggtttctggtatccatcacgggctatccagcgtcaccgaccaaaaccgcacctcgcacccgagttaatggccattggtggatatggagtgtttcaaacgagagaacgaaggaattaagtgactaaaaagtaatttatatacctttatttcggtcaaatcaagcacacaaagacggaagattcgttttgtgtgatggcgcgtagggtagaattagaagccgaagtgaatatacaggcaaatcagttacgtaccaaaaaaaagataggtgcatgagaaggaagtggtcgtttggtcaggattcaataaactcgattgattatcgggtgcgtagtcggccatgatattggctatgatctcttttttttttctttttgcagtttagacaaaaaatgaagattgaaaagtctcttcctcccaccacccccgggagaccgaacaaacaaaagagaaaaggaaatgtgacccaacatggatcaatcactgctcctgcgtaacagactccaatagaaagccgtagctcgtgaacttgcatctgacacaggccttgatgccacagccagggcaggtgagggtgaatgaaggcatccacaagttgcaatcactgcacatgggacggcagaagtccttgtaccataacccaaggtgggagcaaaagctgggatcgttcccaattgtaataggcgaggcgttcgggactgaaagacgaacttcttccaaccatccacaatagatctccagcataaggccattaagttcaccagcaagatcgttgggggtgtagcgtccatgggggtccgcgagcttttgctcgaggaatgagattagagggagcaacgaatcatggcccaccatgtaggagttgatcagtttgtcaacatcaaaattggaatcgtcagtggcagattcgggatcgtcggtgggagattcgaaatcctcaacggtggccttgaaattcgagtgcttgttgggtgagtcagtgaagctggtggagttgctaattgttgagaagccaaagggcgaatcggtgaagttgctggagttgctacttgttgagaggccaaagggcgaatcattgttagcaacagaagcacaatcagagtgaattggatactcgtcataggaacggagctttctggagtattcgtaggcaaacgtgtcaaatgtgtcggcaggattgcaggtcttgatgttcttctcaggcaggagatgcaccaaattatgctcgtagccaaattcgagatcgtctaaagctccttcgataacattatcaacggtatcggcaaatttggtatctccatcgtgatccttcgccatatctgctagatcacgtttcattcgagcccgcatgttttccctgcggagctctgcccgtgccttctgcacttcgggatcaatgccagcccattcgttctcccactggacattctctgcttcaaattgtgcccgtctcgccttggattcggctgactctgggtccatgtgcacacttgttccgtaactgtagtagtaggtatggctgtgctgacgtcgatcccttggcttgtgtttcgatgctggctcgctacattggcttggccagttggactcgtatccatggcgttctcgctttggcggacgattgtagttgcccttgtaagcccatgttggtgtttcatcctcgggggctagatgtctcttggccttcttttgcagggcctcatcaagtaagcgtcgacggtcttcgtcacggagaatctcgacagcatcttgaatctgtttttaatggcttgtcagcgatattcaacaacttcgtatggcattatcttggtgttgtagacatacttttctgaatctctcaatggtcgttgcagagtttccagccttgtctggatggagcttcaaggcaagacgcttgtaagcaatgttaatgtcagggagtttggcatgtcgctcaactcctaggatagcgtaggcatcaacgatcacagtggcagttgacatgtttgcggtcactagtggatgtcagtgttgtgttatatgtgtgagttggcttgagattaaatggtcgttgccagtctttggataggcagatggaataagagagacagagagagtaatgtgaaataaatatgaaggagtgtgagcaatcagaacatgctagtgaggaaagtgtgggaaactgttgggatgacaatgactatatcaaaactcacctaggcaccgcccaaacgtaaggagtcaaattagaaagaagggtcaccgtagcgactcgagaaaagagggagatgaatgatgtaacagagaagacgacgagactggagatgagaatgaggatagggaaagaacaagagtagcactggaggaagctgaacaagaggggaatagagaacaaagacgcaaaaaggatctttagagattcgagaacagaaggatcaagaaaggacgaagagagagggaaagaaggaaggatgagaattagggtataagtatgagggcgagggatgcgggaatcctatttaagtagataatcctattgtaaaccgaatcctattgatgagtgggagctatttatcgcttcatcctataatcgcattgaagaacaaagaaactgacctagtctccagggttagggctatacacaaacaatgcaatcgcacgtggctataaatcagatggttcctgttgaatggattaggttagggctagcaaaatctgtacatatgaaatggaaataaattgactctgattttacacaagctgaaggtcgatctaaatatgaacaagtctacactaaaggcgacttggtcctgtaaaagaaagcttctacatatcctcactggcagtggcaccggtgataatctcaaccagctcgccggtaatggtggcctggcgctgacggttgtacaagatctggaacctggaaagctattagagacgaatcttgaaaacattggaggtaaaacatacttgttgatcatctcaccagcgttcttggaggcgttctccatggcgttgcgacgagcggagatctcgcaggcgtggccttcagccatggcccagaagaggttgttggccagagcgtactcgcggaggctgctcagaacctgatcgtcaacctcgtaagaagagatgttggctacattggatgttagttgaaacttgatgaactgctcgggcgtaatgaagtctcaccggactgagtgatagcctcctcggagtaggcctcgagagtgatgggctcgtagctctgagcgttaacgaaagtgttgtagatgatacgaacgctggcgtagtcctcgggcaggagagcgatctggtcggcaatggcctgggcatcggcgaaggtggggatgtccttgcagacgttggagaagctcaagacgatgttctcgggggcggcacgggacagcgaagccttggccttctcaccgagaataacaacgtcggcgttggggatatcggccaaaatacggcgggtggccttgctcagaccggagtggataccaccgcaaagacccttgtcggagctggcaacaaccagaagaaccttcttgtcctccagaggcttggtctcggcctgctcgaacaaggtgttggaggtcttaccgtagacgcgggattcatccatagccttctgggcacgggtgagacgagtggacgcgacaatcttcatggtgttggtgatcttctcaatgttcttgatggacttgagacgaccctcaatctcacgcagagtcgcgaaggtggcggcattggcgggggcagggcttgatttcgcagtcagcaattgtcgttctcaactcctctgacatccagcgtattttccactgtcaatggtgtcgaggtcgttgcgtcggagtacgtcgggtggaaggactttagcacgaggtatcggatgagaacttaccgagcgacggcggcaccaccagcccgcagggccgggcggacggcacgggagaacattatgcgagagatttaaagaggaaaaggaacgagcagatggtgactgcgaagaggaggggagtgacgaaggttagacgggaatgcctcgctggtcgggaaggaagttgagaaccagggaggttctgtctccgtgctgccgctaaactagaaagggcaagcatctacggtgcgccattccgactttcaccgcagttgtgcctcaggcatttagtatttacataacatcacttgacgcctcaggcatctcacttgtagtccttagggcctcttttcccattgcattcctccattccaattccccccaacttgtttctctcttttctcgcctcttctcacctgtcttctctgttcctctggattcacccgcaacaatcctctttacgcatgtatcattgatgcagcagatcttataaccatattcttactcttcattggtcagaatttccttgctttcctccttctaccaggcgtctcgatttgcccgactcggcgcacgaggacgcctcccctcaccaaagcaccgatttctctcattttaccctcatttccggcttgctagtccaggggctatcatcatgagctcctcggaggacgacgcaccccttatgcgcgccaatggccgtggtaaaggtgcgttcctcgggttattcggctgcacatctacaatttgtcgcaaaccttcgctctccttgcactttgtcttctcacttctatatctctactttgtacacaatcgcacttttctcatagatcagttctcgatggtgcatctcacactttgacgtcattttcttcacactttgaacatacctcgaacagcattctaacatagcgtttcctgcacttctagtttcttcaaagtctcccgaaaccgtcagaatggcggattccgcccctgccacaaatggccatgttgatcctggaatatccattcgattcggtcctgtggaagacaaggatgtgaagatggaagatgaggaagatgtgctgggtgccggtaagcgcaagtctcggaccagtgtgggcgaaaagaagtcctatgcagaagcagaaagtagcgaagaagatgagcctttggtacgcctatccccatttcgggatgaccttagttattcccggtgcgaccatactgttgctttcggctgaagcgtctgacaattcgacagagcaaacgccgacgcacacatgtgaagcatgaagaccccgagaccgatgacgatgtacccttgggacgcaacggacgcaaacttcccaacgccgccgaaacatccatcggggatgagtctgattccgacgtccccattgaacggaagcttgctgcgcaaaagagaaagattgaacaaactgcggagaaggtggccaaaccttcgcgcaaacctgctgcaccaaagaaagaggctaagcctgcggcggccaagaaacagacaaacggagtcaagaaagagccggccgccagcaaagctgcccccaagaaggtgaaggctgaacctgcaaagaagggcaaagccaaggtgaagtcggaaagccaggacgcggaagaaagggaggcggaggaagaggaggagaatgagtaccgctggtgggaagaccatagcaagggtgatggaaccatcaagtggacaactcttgaacataatggcgtcgtgttccctcccgaatacgaactgctgcctcaaaatgtcaagatgaaatatgacggtgttccggtctctcttgcacccgaagccgaggaggttgctagcttcttcggaaccatgcttaactcgacccacaacgtggaaaaccctgtgtttcagaagaatttcttcggtgacttcaaggaggtcatcaagaaaagcggcggagcgaaggattccaagggcaacaagatcgacatcaaggagtttgcgaaatgtgatttcaagcctatcttcgaattttacgaggctcagcgtgatgaaaagagacatctgccaccagcggagaagaaggctgccaaggctttgaaagatgagcaagaagctccctaccaattctgtgtgtgggacggtcgcaagcagaaggtgggcaacttccgtgtggaaccaccttctctgttccggggccgtggtgagcatccaaagaccgggcgtgtcaagacgcgtgtgcaacctgagcaaatcaccatcaatatcggcaaagatgcgaaggtcccgccgccacctccaggccacaagtggaaggaggtgaagcacgatcaggagggcacctggcttgccatgtggcaggaaaatatcaatggcaactacaagtacgtcatgttagccgccaattccgatgtcaagggccaaagcgattttaagaaattcgagaaagcccgtgaactcaaaaagcacattgagaaaatccgcaaggattatcagaagaacctcaaacatgatatgatggtggaacgacagaaggccacggcagtctatcttatcgatcagtttgccctgcgtgctggaaatgagaaaggtgaagacgaagccgaaaccgtcggttgctgttctctgaagtatgagaatgttaccctgaagcccccaaacactgttatctttgatttcttgggtaaggatagtattcggttctacgatgaagtgcaggtcgatctgcaagtcttcaagaacctgaagatcttcaaaaaggcacccaagaagaacggtgatgaaatctttgaccgccttacggtatgccctccctttttcttgcagtcttgaatgttactgacgaaaaaagacttctgctctcaataaacatcttgccaactacatgcaaggtctaactgccaaggttttccgtacctacaacgcatcttacaccatgggttgtgttctcaacgagatgaatgctagcggtggtactatcgccgaaaaagtgaaagcatacaatgatgccaaccgtaaggttgccatcttgtgtaaccacaagcgcactgtcactgctggccatgcgaatgcaatggaaaaaatgggtgaacgagtgggttttcctcattccgccctcatggcgagagtcacaatactgatatatgttttaccacacagatcaagggccttcgataccagaagtggcggctgaagcagcaaatgcttgacttggatccaactttgaagaaaaagaagggcgcggcgttcttcgagatcgatgaggatctcgaccaagaatggatcgaagaacaccaagccttcttgatcgaggagcagagaactaaaatcaacaaaaagttcgagaaggagaatgaaaagcgcgttgctgatggtgagaaggaaatgaaggcttccgagctcgaggagcgtctgcaggctatcaaggagatggagaagaagttcaagagggagaacaaaaccggcaaggtcgaggccgaggccagaggcgcaacgattgaaaagctcgaaggtgccatcaccaagatcgaccagcgggtcgaaacaatgtccgtccaagctcaggacaaggaagacaataaggaggttgccctaggtacctcgaagattgtgagttcttctgttctgatttttacaatatcaccagctaattactcccattagaactacattgatcctcgcctcacggtcgtcttcagcaagaaatatgacgtgcccatcgaaaagttcttctctaaggcgctgcgtgagaagttcgaatgggccatcaagtctgttgaggaggaatgggaattttagtctaccgctcgtcgccttgattacttgcgatctccgtctttctcgcacattactttcttcgtactatattttcggttccacctagtttgccttggtcagacgatatgactttcgtttgtttgtcaagcgactctttcaactctaccaattgatctattcggatctttggttgcattggggtgcttggggaagaattgacgctgccattggctttttcatgattttcgttacagagaggcttggctcagagtacaagcctacgttattggtggtcgtgggtacgatatgatcggtatacgccagtatgcacgagggaaaaaaaaaacacaaaaaaaacacatcagaaaaggactcatcgattcggttggctgcatgacttggttaaatgcacacacactcatagcagttgggcaccttgcacagtttctgtcccgctgctctttgtcatttcggtcataggtcaaaaatttcgaatacttcaattcaatcgtttcttttccaatttagcataagctattgtttccctccactcgtagtccaacgtagtagttgcccggtgacatgtaactaggcttgtaacgtagttcttatgtctgagttgtggatatgtcctctgtggaacctgcacaacatatctgcagggtctatgcataatgcatgacatgaacgagactagcgctgtgtgtgattcaaaggtacaactttgcaggttgtatgtggttgatgtctaaaacatacacatcaaaagtatacaagggaacgttgatttgagatgcagatagaatatcagagaaatggaggaagggctcaatatgctgccaatgcagggccatgcaaaaggtaagaatgagggaagaaatcgaaatcgaaacatatatgcagaagacaagagaaaccccccccctcccccccatataatagcgattatcaattacagtacaaggtcgattcacatctagcgatgctagacaggtctgtctggataaatagcttcagaggtaggaggagagagagaggagagtagaggtggacaggagagcgtatggagatgcagatcatgaaagggtcgtgtcgtaggggattcaatgcaacctttttcggacacaatgcgatgagatgaccgatttcctcatcgggtagtggagaccgttaatgaatcatggtgggggatagaaagagtaaaataaccgacggacgggatatcttgaaaaagaaaaaaaaaacgacgaaagaaaagacaaaagatccgaaaactattcgaatcctctctcaacatggccaccagcccatgcgcttatagctgtccacaatttcgcggatgctgtcagccccgaagttcgggtacaatggcttccagccagtctctttctcgaacaatgacccgtcaacgcacatatcctggtccctgagaatatcacgctccaagaacgggctgatcggtcccggtcgcgtgatatttgccctctcgacgagctcagcccaagtctgcagaccgacttcattcatgtcatcgaggacatcgtcgaggttcagcttggcgatctgcgaggcaagcgacccgatgaacgagaccttgaggccgaacacctccgtcaaggccttggcgacgtgttcttgtttcgtgtcgttgtgatcgacaatgttgaaggcaacaaccccgtccttggggtcgatgaaacccttggaggcgcgccacttggcagcctcgaacagcgcgctagcggcgtccttgacgtgcagggtgttaattttcaagtcctttgtgtgcagaagttccagatcctgcttgagatcaacgtggacggcggacagacaaatgcctgtggcgaagtagcccgggtcgtaggcgccatacacgtggggcaggcgtaccgcgcagtactgcaggtttgggattttccgcagttcatccgcggccttgagcctccatgcggccagcttgtgccacggaacgagcttgtcggtctccttgcgtggcgttgagccgcccttgtagacatgcgcggtcgaggtctcgatgaaggcggggatgccgcgtcgggcaatttccttgccgagcgcgactgtcaggccgtagctgcgcacttcgtagacatcgtcgggttgggagtggcgtgtttcgccgccgcagttgaacacatagtcgaattgttcgccattggctcggtcgaatatgcgcgggaaatgttctgtgggagaaccggccttgaggtaagaatttgctacggggtgagggacttagcgccgggccactcacgttcacggctggcatctgcctggacaaacttgtccttggagcatgcctcttcgaattctggggccaaccaagccaattgtggcagaactttgtctaccaaacggacttccgaggctaggttattctcgtggatgtatagcgcgaggtgtcgaccgatgaagcctaaagacggggagtgtcagttgggagggaatcctctttttgaagacaaaaaaaaaaacataccgaggccaccgacaatcagcacggcgggtttttttgcttcagccatttggaatgtgaaagataaaaaagcctccccgcaggttcaggaggatgaaaggggggaaaggcgaaggacgggagaaaggaggggggcggactaaacgggcaaaggggaacaactaaaaagaaacagaaactcagaaaagaatccgaagaatattatttgatggaataagaggaaaaggaaaaaaaccccaaaatttcattattcgggattcgcattctcccctgccaagccggttaatccacgacgttgactacggagtatagcgagtgggttacagtggaaacaccagcatctacctgtgacgtcggaggggagatagtccgtcttagtgagattagtgcgaggggacaattccacttcttttaattatacagagactaatgtgcacagtaggttgtaccatgtgaatttgtatgtagtcctactacttactactccgtatacttcgtacatatataggtaaatccatacatccctgtgttcgttggtcccatggtactgggtttccgatcagccgaaccataaatgtgaatgctaagcctctcccatgcttaattcgactcaatatccaattgggttggtttcggctattgcaggattttcgactgagctttggcttaaaataaatacgtacaaatgttacatagagtcattggaagcaatttcggcatattcgggatattcgcctttggaaattgcagtcgtacatagtgttcttcgagatgaacaattcgaatagtttggtcgaaacttcaccagaatcggccttcggacacacaaccaagaagggaggggacaagaggacaagagcggggcactggcacttgtcaacgggcgcagggcgatcttgtgggcacggcacacaatcgaacagcaaggaaacggttagaagaggggtgagcggctaggtaaggggcttgctcacccgtgtccaactccatagagtctgctttagaggcctgaaaaacatatggaacaaaatgtaacttaaattagagggatgtggtgatatcggaaagatgttggcagattcttcaagaacgggtctggtctgtgccttctcgaatcatatcgcatgctaggaccctcatgctgatagccacatctcgtggtctgtagaacagagataaaattcgtgataacaacataaatttagctaatatagtggagccgcattgtaaagtttgatataagcctcgaaaattctagaaggaaacctcgctacggcattccgaatttatatggcctctttcatgattagcgacctccaaagcccgcttgtcgtgactacaaaatacgtcgactggaatcgaagctaagcatatagaaagcgagagtgtacagttgtgatgtatatatcttgacaggcataagagataacgtaatgtaatggtattaaatctcgttgtctagcgagaagtcggacactgttcttctatgtttttgaatatctttcgctcatgggttctaggaaagcgaccgatggaccatgggttgagttgaacaagccaattgccttcacaggttagtagtctactatgtttgctcataagcgtcgagggtgtgggaagcgtattctcggcttgttgctagtcgtgcagcttagcagtcctagctaacacgcattataatgttgttaataattaaggacgatggtcataaggttgatcactcggcatgtcgtaggtttggtatacacaaagggtgttgtacattggagtatctggatggtcgaagggagctaacacattctcattggtagatgagtatatccctcctacaatcaagtcgcaaccaagggattcggacattcttttaaatgcactaaaacatagatcatatcggcagcgtaaacctaaccactaccagggtccagcaatttctatgtaagatctctcagcctttgatttatacgaatgtggaattggctcatggttgatcactaagaaagagtaacattggaatataggtaggcctaactattgtctcccggcatgctacataggtatcaaacctcttgccttgaatcttggaacggtggagtcggaaagtggggccgatcttgtaccttacagacatgacctattcaatcacatagacgtaattataggttgaacaccttttccatacatatgtatgtaattattcacttttaatgatgagtaaggtaatattgcaggtatctatccgagcctatattctcgttataaaattatgccacattaaatttcctagcgggacgtcggaaggacgctcgagatgaataaacacgaacaaaagatagattcatcttggatacgaatcatgaacacgaaagagttccactcaaagccaatacatttcataatagccaaagtaagatatgttcatactgcaaaagcaagattgagatcacacaagcccataggatcatgatgcgcctagacacttcagcgagtttctgagctccttgatagcggtgtcaacatcgtcgaaagtcagagcagagaccgcccaacgagcatgtttctgcgccaactgcacagtgctatcgtctaggccatgtgatggttgggacgggaaatagggagccgaggcaaccgggacgctcgcagctgagggtggaacatatgtcggagcagcgggaggctggataggagcactagcacctgaagtattgtagaaagaagccgggtccggagtggatacagatggatcctcgggtggcggaggaaaggactggaatgcagtcggggtatctggaagcttaggtaccgaggacgaaccgccgatggtcgctggggttgatgggagctctaatccgcctgtgttgggatcggcatccgctggctgcggaggatacccaggtgcgttgcgaggaacagaagggatctcaggcggaggacgaggtgttgacgatgtccgtgatggatgaagcgactcatcgagagttgatttccgagccagctctcgtccaagacggtcagactcgtctgggatctcttcgatggaggcttgtcctggcttggaggcctgttccgctaccgactcgtcaaaagcctcaacatcaggatcgttgactagttcttcttcctgctttggcgcgggatttgtcacgttgggatcttcaccggctttgaaagcctttacaatccgaaccgcgtggaatttggcgaatttgatccgcccagcaagttctgggtctaaggggccccagattgaacaaagttcaaggaacgtagccgctgcctggaaagtatctgccgtctgcctttttggcgattagtcatttatagcccaaagtatcacacgtggagctcactttgtgactttgttagcgttcatagcggcctcagcacggctgaagacctccaacccaaattgctcgacataggcactcgccgcaacagtgtctgtcactgtatcattgtctgggttttctactttgaactatttcatgccaatatgatcagctgctagatctcaaccacgggatgcggaatagagactagtgtggggagcacgactcacttgttccagcttgtccacgaggcttgtcgtgtagagtttgatcgcatcatcggaattgtgaagacccctttcgataatctggttcacaatatgaaaattgcctatataatagggttcaatcagctcaaatgttcagttgcgctctgcgcggggtcttgcgactcacaccaataggcaatcacaggtttggcattctcgatctgagctgccctgattgcaaatcgcccaatatctgccgatcggagtccagctggtatattactcgtcatggttcaggatttttgtgatgttaaggagaagatgcatgtagtgaacaaatgacgtttggagctcgcggagtttccaccgcccgtgcgggggcctatgtaggggcccttatcggatcttatctactatgcggaccttatctaccacgatttgaagatctatgaaattgcgaaactatttcatgatatatttgtccgactgtactgggtatcattcatcttcattcgtccacttgccaatctccactctctcctcggccaatgcttccacttcaaaatgatcctccacctgccctcctggacccccgatgcgctcaataacaatccacacacagcgtgactcggcattgggtagcaaatcgaaatcatcgattcgtaccccggacgcagcatcgctgtgagttccatcctctgacgtggccagtatctccttatatggcccctgacccagctccacggtcatcaacacaggagatggagcaacagcgcgagagccgatcgtggaccgcttattcctcgcaataagtcggatgcgtgtcaaacgggagacctgtagcgaggccagcatccggtccttacccggagataaaacacccacttcggatagtacggcgcgccgcccagcagactcggaaaccaagggctggactacacacgggatcgtggatgagatccataacgtgaaacggccaagctggtcaggtgcaaaggtagagcagataatggtgtaggtgcctctgtccaagcatctagtctcggccagtgcgcatccgcgacggtactcgccactatctgcaatgatgtctcggcttcgcacgcgcgatatgcgctgcccgtttgaccaaaatatttttacgtgggtcgctagctccgcttcagtggtctcgaccaatatcgagatatctgtcggttcagaaattcgtatactgaattgtggattggagtggtatcgaggtgactcggcattcccgccagctgtcattgttgtccaggaaccacttgccttggtcaagcatagatatttatctagcgatcgtgccacggccacaggagcggttgaaaatgcagagagagtgaaattctgggtagatgatgggagtgattgctgtgagaccactgcggtgtaggttgacttgggaggcatttccagcctcataagcgtgttcggagagtccacgtatggtccacgatggagcgcaccgtcattgagagacactctgcggccatctgcttgaaatatgtagatgctgataaagcccgttccattctccgatcccccagaactaaattgttgctggtttgtcttaaaatgtttcccaagcagcagccagaccgttcctccatcactggagatggagaattggggattcttcacgaagcagccggtcataacttgaccgtgcgacaaatcccaagtaaaatgaatgtcctcgcggtatttgaacaaaccaggattccagttaaggtaaaggttctcgaaattttggagaacttgttcacaatccatccaaaacgtccctggggaaaggggaggtttatcatttaggctgagtgagccgagatcagccgtaaggctgctttgtatgtggggttctgcaccggcccacgggttcttcaaaagaaaccgacgacgaccctggacttcctttaagtccaagatagcataatcgtgctcgcccaccagccccaggccttgttgttctcgttcagtcagcttcccagtgccgatagtcaaaactacatcgccatgtgagaaggcactgtataaacgtccccaaatctcatcggaggtcaaatcgtcgtggtgtaaacagacttgttccgggatccaaccagtaagcacccaaaggtcggtccctgagttacttcctgggaagtcatagcctccacggaccttcaagtaggccttctccacaagagcaggccacaaaaaattcgagttattgcgatcgattacgtggagtgagcgtgtagtctttgacgatggcaatcgatcatctatcactaccttccggaaagatccgttgaagtagaaccgaaatatgtacttcccagaatgcgaaagtatcgggttcctatcctcactgcacgggtacaatgtcggtgatgcatgctgctcggattagcttttcaagattcctcgacgtgggatcaagtaagtccatacctgccctagacctcgttccgatcgagatgttgtggcacagaggctcgcgaccactgagcaatctgtcaagacatcctgcacgagatctgtttgttttgaagtcgacatagctggttcaattgcatcatgtacctgattggccgcgttatttgttcgtagcagatcgtgcggccgtttccagcccgcgaaaatttctctctggcattcagagaggtgcaaatcaggcgcatccctatacccggttagaatagatcagcattgggccatcttctcgacatacgtaaaaggctgccctttgaatacaaactcatcctgaagcggggcgcgactccatggtggaaagatgtagccattaagtttggcgccctcgaggataatgatttcttcacgggtggtgagcttccgcgtggatgccggcggccgtaggctggggaaggctttctggggccccgcacgagcagccgactgccagtcagcagcagccttgatcttctcagctttggacagcaattccttgcattttttatctagttgttttttatcctcggcgggcgccaagcgcaacgctttcatgtaatgctccgcggcattgatggctgcctccaatgccgctttctgggaggtcgctgtggctactgcctcttcagcgctctatcaagtcattagcttccttcaggtataattgagaaacataattcggtaccaatgcttgagatatgtaggactgtgtgggagcaggtctagacatacttgcgttgaccggtcgtggggtatccaggtaatcagatcgaacagcaagtaaattaccggattaggctgagccgagagggccctttacagattgtgaaatattccgcgacttactattgtagagatcgatacatttggtaataattggtatattgagaatactgtacacaatataatgaaaattatcccatcaagcacatatttagttagttaactctgtaaagtgaagtgaagtcatgacataagcccataccgacctcaccccgaagtggacctcggcttgttttttaggtgatagcgccgaggtgcatttgtgaattcccgcatgagctcggtctctctttttttttatggttcgggtgacttcggtatgatcatcgtctctatccatttccccattgtgctttctcctcaatctcaccttctccgttgttcggagccaagctgtgtcgagccccgctcaatatttctcgtgtcgcccggccgctaagagaagcgagccctctccctatatcatattcttaatcgtcgcgttcatttgatttcgaataccctaaaccgacattatgactggtcaatccaaacctgtgctgtcgccatggggcagcgccgtggcgggtgcgacaggcgccgtcctcgcgaacgcgatggtgtacccgcttgacttgtgaggtcccagataaaacagtcctcaaattatcagatcaaatctcgctgactctatcgctcttcatcctgtagagtcaagacaaaactacaagtacaagtcaaggagaagaatgcatccgtgcaagccgacgatgtcgaacattatgaatccaccatggatgccatcaccaaaatcgtggggaaagagggctatagtggtctgtactccggaatggttggagcccttctaggtgtcgcctcaacaaacttcgcatacttctattggtacagcgtcgtaagaacgctctacgtgacttctaccaagtcgtctcaggctcccggcacagcgattgagctttccctgggcgccgtctctggtgccgtggctcagatttttactatcccggtggctgttattacaacccggcagcagacacagccaaagggcgataagaaggggttgatcgagacgggtcgggaggtggtcgagagcgaggacggctggaccggcctgtggcgcggcctgaaggccagcttgattctggtcgttaacccggccatcacctatggtgcataccagcgcctgaaggaggttatcttcccggggaagaacaacctcaagccctgggaggcattccgtgagtagtggcaatcaccggggtcaacaacgacttgctaattatgaaattagtgcttggtgccatgtccaaggctttggccacgatcgcaacccagcctctgatcgtcgcaaaggttggactgcagtctcgcccaccgcctagccggaatggcaagcccttcaagacctttggcgaggtcatgaagcatattgtcgataatgagggtctcttttccctcttcaagggcattggacctcagattctgaagggtcttttggtccaaggtctgctgatgatgacgaaggagaggtatgtgtttctgttcataatttcgcatttgcttgtgctaactctcgcaaaggatggagctccttttcattgtcctgttcgcctacctcaagaacatcaagaaggataaattgcgtaaggcagtggacttggcagcggaaaaggccaagactagcatgcctgctaccctaaagtaattgttttatagtcagacggtgggatttttccgaactgtgtttacctaactggcgcgttggcgtgccattggaaattttggtgggttttgaacagtctagacatttcccggcattttcttgttggaaacacttgatatgatagatacttgtgtttccagcttttcaatatcactatagatctgtacatggtcatgtcatgccttacttgcttaagctcccatgtagtacttgtttttggacgcactatttagctagttataatatccctgattacacatgtagaaaggtcctctatacgtcaatacatttcaccaccttcgtatattatacccaagtaaagtctacaacttccatgtcaatggcgagtatggtagtaatggccgctgagtacctacataagaatgaaagacatttgagaagccacgtaggcatcattttgggcatcattctacaacgatccctccaatagttagttgtagttatttcaaggtcattggttgtttactaataagaggaattggtggttgctgctttaccgcttgactgatcaacttttaccccaacaactgtcaacacccctcaccaaaccctcgttctcacaccacgtaaacttgccacttgtgtggcatgggtcgtgatgcgatggccgccatggagctccgagtcgaccaatgacgaccaaaaacaaacacccggctcctggctctcctccgcggcgaacaacccgagttccatcttcgactggacagcattcacagaagtcagaaccattgtcccaaccctcgtcctgacaagcggcattcttattgcagtgcgcttccaccgccgctacctacggcgcatccccgacgcgcccagcatctcgtcctcgtatcttcgacggcggagcatcttcggccaagtcacaagcgtcggcgatggagacaatttcaggatatttcatacaccgggaggccgcatggctggatggggctggttaccgtggaaaaaagttcccactgtgaagaaggatctgaaggataaaaccgttcgtcacccaccactcacctattcgcttgctgctcagaacaggcataactatgcctctacatatcataccacaggcccattctttatatctacaaatagcttacatattcactcaaccccagatccacatccgcctcgctggcgtcgacgccccagaactaggccacttcggccaccccgaacaacctttcgcgcgagacgcacacgcctggctaacatcctacctgtcaggccggcgagttcgtgccctcgtctaccgccaggatcaatactcgcgcgtggtagcgagtgttttcgtccggcgcgcatttgactttccgccattccgtcggcgggatgtttcttacgaaatgctgaagcgtggcttggctactgtatatgaagcgaaggttggctctgaatttggcggtgaaaagatggagaagaaatatcgcaaggccgagtggcaggctaagaagcgagccagggggctttggaaggattatggtcgtgtcgggtctgcttgggagagtccgagagagtataagaagcggattggtatggaagatcctcctccgatggagaaagggaatgggaaggggaatgggaaggggaatggcaaggggaatgggaaggggaaaaccgggcagaaatagatgaacgggtcgcggtaagctgggcttgcgattgtggctatgagcgtttatatgttgttttttatgttctggcatttgcatttgcatgtgacgagatggcacgactaccatttcactatacagcgttgtaaatgtatggatagtatgcgacaatcatgatcaaatcgcactttgaatgctgaatatgacaccaagtttcgttaatctatacatgcgcggggggttttgttccaaaccaggccccaatttctaaatggacatcaagactcgagtaatccgcctatagattaggagaatacaacgacaaaagtcagtatgcaggctattatttgctcagcagaaccgccgctcaacctcagcgaacaattttgggctaatttcgttggagctattaccctccgcatggaatagacacccttgacggtcatagtgctccaagagggatttgctcgtctcctcaaacttctgtaaacgctgcttccatgtatcgagagaatcgtcctctcgctgcgtcagcggctcgcccgtgacatcgtctctgcctggcacctttggtggatggaagtctgtattatacacgcgccctgagggctcgtggacccagcgtgatgcgatgcgggcgagaatcactgatggaggggtgattatgtgcacgacaaagttgaccgatactaggctgtccaaggctattgcctgagttgcggtacggggaaacccgtcgagaataaatgaggcagagggatcgattgtgtgggctgatgaggaagtatcggctgaagaagatgacgaggatgttgcggatggtgaggatgggagtggtgggaggagccagcccttagatttcatatcatcggagatcaatttcaggatcattgagtcgggaacaaggttgccggactgcattgtggcctcggcttccaggcctattactatgttagagatctctgctctgtacgaaactgcgccgttgctcattctacttaccgaggggtgtgcgtaggcgcacattttctctcaacagatcacctgagctgatggaagccagctgtggaaatcgggatagcagtcgctcagactgtgtcccctttcctactccaggcgcgccaatcaagatgatccgcgcggccttacggagctgctttgtcacatgcgacataatatgggattgctgatgctgatgctgagggctgaggttcaaggttgctggaacggagaattcgacggtttcaaatgctggggatgcgggaggaacgacggggagaaaatatgcacaatatcaggacagcataatggattgaagggaagagtgaaggcctgggattagaaaacaaccggtcgcatatctccaaggctaactcttttgagaatgttgcttctgcggggacgcccggggaggttgatcttttcggctatcggtgaagactccgaggtaagctgtatggcagcactcaagtctatgtaggtaattatgaaaatattatacgagaacataacataactaccccgagcgaagatcaaagacttatatatctacttacaggactcggtatcaatgctcatgtcacatgtcgtgccacatggtcgtagaaaacgctctgatcggggaaagccaccacccgtgctcaggccaagcaccccagggagccccagggagcccccggggccccagggctggggtacagtattacgtaatatgcgccaaccgatttctttcacgtgattctacgcgtgggacgcgttcgcgttgaccaatttagtgcggagatctcatacattcgtttctcgacaacacaatacctacaccatgattcgacaagacgcccatcgcattgatcccaaacgacgggctgttattgaccctaaaaaaagacaatttgctaccccagcgtacaagcagcaggactatgctcaccgtctgaacatttatgaaatacctcctaccgcggagatcaccctcgaacaattcgagcaatgggccattgacagactgaaaagtatgcaaatttacaccttcctgttgtatttctacccactaataccaaacagtcttggccgaaatcgaagcatgctcttatagaaacaaatcccccgccgagacagcgacctacattacacccctgctacagaaattcctccctctctcctccaatacatcctctccctctggcgctgcagacccccgcttgaaaaatgagcgccaaaaggaccattactcccatttcatcctccggttggcgttctcggccacagaggacctccgtcggcgtttcgcccgcgccgagaccatgctgtttagatttcgtttccagcaggacgactcgagggagaagcgcgcattcatcgatagcttgaatctcgattgggaacctgtgggtgactttgaaaagacggagattgcggaaagtctcctcagctccacgcccgggctgcgtcggcttgatgatgagacctggtataaagtcgattgggagaaggttcccgaactggtcgaacggcgcgcggttttcctgaaaaaaggcaaagcttatgttcctggtcgagagcagctgagcatgatcatggctgagtttaccgctcgcttggagcgcgcactcgaggtatgtctgcagtggtgacgcttaatacatgaaatctcgtggctgattaattctagctcacgagtcgtgccctccctcgtttggacgaggatgatcgtctaacgcctattctcaatcatctttcaaagaacttcggcagcgccgagtcggtatactcggaaggcgaagggtatgtggacggatctccgatcacggccagctccatcgaccaactggcccaacagcatttcccgttgtgtatgaagagcttgcacgtgaacttgcgcaagaacaaccacctgaagcacttcggtcgactacagtatacgctcttcctgaagggtattggcttgtccttggaggagtgtattttgttctggcgtcagtcgttcaagggcaagaccgatgacgagttcaactcccaatacaagtacaatatccgtcacgcctatggcgaggtcggtggggatgtgaatcgtcgcggaaagggctatactccctactcgtgccagaagatcctcggcgattcgaatcccggcattggccagactcacggctgtccctatcgccattactcggttgataacttggtgggcttcctccaggccactggcgtcaatgacaaggaagtcctgcggggtgtgcgtgaggacgttggtaagatgcggtatcacattgcttgcaacagagtgttcgaggcgacacacaagaatgagatcaagaaagtcaaggaggatggctcgtggagtcagactgaccttgacacaattgttcatcctaacacctacttcaagcgcagcttcctgttgaagcagatgaccaaggccccgaaggatgcttagggcgtcttttcacatgtcaaattttcatgatataatgtcgggcagtttcccagttttctgttttatagtcggcgtttagagggagcataagcttgtacgagcacatttgaagcaggtggaattgaagcaagataatatatattctaaccattatggtatacaaaatgggagtgtgaccacagctgattcccagagaatcggaaaggatcagaatgacctctcaaatccaggtgcccagcaacgggtcaagtcgttctccgctcaacgagtggacaactttgccatggaatgacggaagttgtcgatattaacatgtttacacacattgtaggctggcgtgaatttgaagaagaaaaagaaaagagcagcagaaactgcgcacgagccgagttttaaggatgttttgatccgggaggcggcagagaccaactgtgctgcaacctggccttactcacggattggacctccacacaacatactcctccatctcgttcattcaatccctaggtattaaacgggactctgatttcttttgggactggattatgctccgggtggctcacttgctttaatttcttggagtagaccctaaatttcaaggttccctctcctcgcgacttctcggtatccgcatataccccctccctttgtcaacacaggaccgagtcccggaacatctacctacaagatggattacgaagcgctcaaggatcaatggagcgatgtggaggaccgcgatggcctcaggctcagttggaacactttcccgagcactcgtatggttcgtgatagtggccctctctgaccttcaccgcatcatccgctgatgcttgatataggaagcgtcccgcttggtcgttcccatcgccgccgtgtacacaccgttgaaggaaaagcccgacgctcccttgctacaatatgagcccgttacttgcaagcagccctgccgagctgtgctcaacccatatgcgtacgtgacatgtcgatctgatatacctcaatgagtagatggactgacgcttggacagcactgtcgatgtccgcgcacgagtctggatctgccccttctgtctctcgcgcaaccctctccctccgcattacaaggatattacagagaacacgatacccccagagctccacccccagagcacgacaatcgagtaccaattggcacggccagcccccgctccccccattttcgtctttgtcgtcgatacctgccaggaggatgatagtctgcaggctgtgaaggattccctcatcatgagcttgtctcttctgccgcccaatgcgctggttggtctgattacgttcggtacaatggtaggcaatgatgatcttcgcaacgcaggtgacatgttgttgaccttgatatataggcccaagttcacgagctcggctacatcgaatgcgccaagtcatacgtgttcagaggcaacaaggaatacaacgccaagcaggttcaggagatgctgggcctatccggtggcgtgcgccccggtgttccccaacaacagccagctcgtcctcctcttggcccggctgcgcgcttcctcatgcccgttcaacaggctgagttccagatcaccaatgtcctcgaacaattgcagcgcgatccctggccagtggccaatgacaagcgtcccctgcgctgcaccggtgttgccctgagcgttgccgtcggtctgcttgagagttccttccagaacgccggaggccgcatcatgacctttaccagtggtgcagcaactgagggccctggccacgttgtttcgcctgaactgaaggagcctattcgttcgcaccacgatattgaacgggacaatatcaaatactacaagaaggctgttaaggtcggttctcaacgcgtgagtgtattggattttgctaatttgctcctagttctatgatgccctcgctaagcgcgctgccaacaatggccatattgtcgatattttcgccggctgtcttgatcaagtcggtttgctggaaatgaagaacctctccaactttactggcggttacatgcttctcaccgatagcttcacatcctcacagttcaagcaatcgttcgtgcgcgtgttcgacaaggacgccgccgataacctcttgatgggcttcaatgcatccctcgaggtgctcacgaccaaggaacttaaggttactggtctgattgggcatgccatctcgctgaacaagaagtcaagctctgttggcgagacagaatgcggtatcggtaacacctgtgcatggaagatgtgtggaatggacccatcctctagctacggtatttactttgagattgccaaccagggcggcccagctgctgttcagcctggtcctcaacggggtatgattcagtttttgacatactaccagcattcctctgggcattatcacctgcgagtgaccaccactgcccgccccttgagcggacctgcaggtgacccaaccctggcacaatccttcgaccaagaggctgccgctgtcctcatggcccgtattgcagtgttcaaggcggaggttgatgacggtccagacgtcctgcgctgggttgatcgtatgctgatcagactctgctcccgattcgctgactaccggaaagatgacccgacatcattccgattggaaaagaacttcaccttgtaccctcagttcatgttccatctccgccgaagtcagttcttgcaggttttcaacaactcgcccgatgagactgctttctaccgccacgttttgaaccacgaggatactggtgactctcttgtcatgatccagcccactcttgattcgtactctctggagcaagagggtgctcagccagtgctgctggactccgcttctatccagcccgcccacattctcctccttgataccttcttccacatcctgatcttcaacggcgagacgattgccgaatggaggaaagccggataccatgaacaagagggatacgagaatctcaagttgcttcttgagcagcctaaagaggatgctagggttcgttcccacctttcttgttgatctttaacctatttactgactgtgtattataggatcttatttccgaccgtttccccctgccgcgtttcatcgtctgcgatgccggtggttcccaggcgcgtttcttgctgtccaagttgaacccgtcgaccacccataccacaggtggctacggtggcggtgtctcatcgcagaccatcttcactgatgacgtatcgctccagacattcatggaccacctgatgaagtgagttttcctgcaattctgatggatccttccatgctaattttattctagacttgctgtatctggaaccagctaggtgttatgagacatggccatgagagcaagggcggtctgtcatcgaccctcgggtcttgtgtatctttagcggtgatttaaatcttttgacgcgatatagtagaagattgaatggactataccattacaggaggatttcttctaatttcctgcaatatttatagctaaaagccctgaaccgccgagaataaaataaatagccgtcttaccatcccaccctgagttagggtgggtctgtcccacataacgagagattctcacaaaacgagagatctctcttttaggtatcttttatatggtatacccgtacaaaaggtacatatatcccatattatgttcttaagcctttggagttaaaggggaaataagagtataaatcaataaaaattttatagttgaattaattggctgataaaagaaatttcagatatcttatatagagaagtaaagaccatatttatgaaagagatatatgtaaaaacatcaacgttctaccgcttagagaatactcaatatttcttcctaatatgttaatagtaaataaaatagacctcctttagactatatatctatcccctactatatctttttgtaagtattcccagaagtgacaaaatctctactatatatatttgtaccttttgtatgggtataccatataaaagatacctaaaaagagaaatatctcgttatgtgggacagacaggtatggggcggtaagatggctacatacccaaagaggcaagaagcttgataagggttttattgtgtcacgtgcttaagcttgcgtgccctaactccaaatttgaatattcgcttagatgagcaagtgtgggccgcgctagcaacgagtctccttcaagtttgatttttttgctccttttcttcctctcctctgtaaccaccctcttcgacaaccaaggaagatcgactacctttcgcactcgccatgcgtaagtatcatctacttggcctattgcaagatggcgactaacattccctcgtgatcagctcccaagttcgatcccaatgaggtgaagatcatgtaagtgaatttttccccacaggtcctctggctgtattcagccaacaggaaactaatcattcttttgtctttagccacctgcgtgtgactggtggtgaggtcggtgcccagtccgctctggcccccaagatcggtcccctcggtctgtctcccaagaagattggtgaagacatcgccaagaacactggcgactggaagggtctccgtgtcaccgtccgcttgaccatccagaaccgtcaggccgccgtctcggttgttccctccgcttcttccctcgtcatcaaggccctcaaggagcctccccgtgaccgcaagaaggagaagaacatcaagcactccaagtccatccccatggatgagatcatcgagattgcccgcatcatgcgcactcgctcgatggccaaggagctccgcggtggtgtccttgagatcctcggtactgctttctccgtcggctgccaggtcgatggccgcagccccaaggatgtctccgacgacgtcaagtccggcgagattgacagtgagttttgcccatttatgagcggttcgatcagctactaacagtctaattagttcccgaggaataaattattctctcttgaatgctcaaaaaagaggaggcctatctgatttctatggcgtgcttctcttaatgatgagatggctagttgcagaatacgaatggttactcaaaaccaacaaaatattcatgagtcatgacctatgataccttttcctaattcgcgagtgcccaattggaacaaattgaccagctcgctgctcgttctttttcctcgttcctttccggttgtattatcctcctttctcccaatccctctcgtgatcctcccgccttctcctatggcgatgagaataatggaaggctatgcccggcgcagccgacagtccatcctttggatggaacccccacaacactctggcccttactgttctttccctacggggattgatcatatcaaaacgtggtataggcttattttaagtggggaagagaaaaccagtcccattactcatcgcggtatccttggagcttgtcttcgtgggtacagtggtccatatttcgggtctacatctcttgcagatgattatccttatttctcgtaggccgtagtctcgctagctccaatgaacgtttctgattatcattttattttgcatctcgtatcaattatttattctgcgcaaggatccgtggggtcggaccaaagtacggagtactttaccatatctaacacagaacctgcaggctgtcagcatgcgtacatatgcaacgtgatgttattgacagttgggcgtaattctaatattgatatgatatggctacttggctgcttacaacataggctgtacggaatgctaggttagaaccctagtatttatttccattgctcctgaccgatatatatattccgaatgaaacgagccccacgcgacaagggcgatgtctgtgctgcaccacgaatttacaattgacatacctagctactccgtacatggtacagaagtagacgtcacaccaaggctgcaaatagccctgcctgcagtctggaacatccaacggccgctacaccacgcagagctcgagccaacaagtatccgagcgtgacgcaccaatggaaattcacatcagaacttagtacggagttctccgtgcagcgattttgttgcccggcatacgtggacaagaacagttgtcctaaattctcctccgtagtggataaatagaaaaagagaatattgtcaataattgctcacgaatggctgtgagattggtcaatataataaaatgaggaatgtcaccgaattaatgtctaacaatccacccataacctcagccctgataaggcgaggtgcatgctcatccacaacgggggctgatccattttgatgtgcgagttgtgtttcgtttattcgcgggatatatttgggtcgaatggagtcggaatatcaagtagaatatcaagtggatattgagattctttcttttattttatttttctctattgacatactgaaagattgagccagtcaacagtgtctgtatcacccgacccgcatgccgctgtacaggaacgttgtgcaggccaaggaaggatgcgacacacggtgggggcagtttgccgatctctgcctatgacacgttaactttatgggaaacggatgaagggttgggatattttctatatctttttttataggtatgtaggtataggagagaaaggtatattatgtgatatacaaaaaacatatgatttaattgcttcgcttcgctccgcaattaaaacaggaggctaagaaatgacggcagggatcgaggtggaaatgcttgcaagttggaaccccagaataataccggataggcaaggatcggaggagccaacaaacggggcctgtcagaagaggatgggaaaaaagggaagaattagggaaaaattagggcaaaagagagaagaagaaagaaaaagaaaaggatgtcaacaaatacggcatactcagtccagtccgagaaggagaacgagagacagtttggattcaatttccttaggttcagctaaagtcccagagcccacagaaaccgagaacgggctcgactcgatcaccggcgggggcgtcaccgatccatcactagtcgccgtgatggaaccaaatgatccacaaggattggatttatggagagccgttggatcaagtggatatttgacatttgatatttggatttgtatgttttggagggattgaagggagggagatggggtatattgtatagcagaggggatatatccagagatagaagagatagaagagatataagagcagcatagagcaatatcagacatagaacataccccattcaacatcctacacattgtgtttctttattttatataaaatttatcttccccccacccgaatccaccgtgtccactcccctcgctctcaccttcaaccttgttctttctgactttgcttgactttcttgatcttctcgttacttttctcctcttcttctcttctctctctcccttccctgcacagagtactccatatcctcttccttcctgctatccccactgattctcttggtctccattattgatctacccctcgcacttgccaagatctcctcttattggctgtatcggacaccagcatcgtgagctggacattctgtctcccttgcatctctgatctcctcttggattttggatttctgatttttttttctgctccctcttatcatacatacttccccatccacacttttcagtcgatgacgataccctgaatccttggtttgcgcaaactgaaaagccgcaaccggctgaattgcttagaactggcttgactggcttcacagaatggggtgtcggaaacgttacaaggatgattgttgaatgttgactccattgacgtgttgagtctttggtatccttgtcgctggtcggccaggtattctgatcccagtggatcgaggagagagcaaagatgtatccgaccgtcgcaccgtttcccccggttcaaccgcaccaccgattacattatcatacaagcaccctcaaccaccacatgtacgatgcgaacgactcccaactccccgtacgcaatgacttctccaaacctctcttcaacacaatgccacgatcgcgcatacaactacctcatccagttcaacgcgtggattcccgcgatggctccggctatagctccagcaccaacgtggccgaacataccctgaggagaaaaacccccaacggaactctggctgtgggatatgatgggacccctaacgataccattcagccaccagcatgcaagcatatcttggtttcgccgatggagcagagccagttcattccgcctcaacaagggatgcagtccgaaaattggcagctcatgctggaccagtcagccaccaagcaaatgaatttccccccggtcttcaaaaatgactccgcaggtaatacaatccaaggagaagtcgttcaagatgtgcatgggacgagctgggttcgtcctgtccattatcctccgggcgttgactccatgttgaaccagactttgcctctgcagccatctcagcgatacctcttgcagaatgggcaatatgtgcccaccgttctcccagcaaccctgcaatcgtgcctaggaccaactgcttcggcaggtactggaccattcggtccgtattggcctgatggagtatacatcccatatcgcccggcagcttttcgtgatgcgcgttttgaatccccgacgccctttacaaagcagatgagccagtctttttacgagctcaaccagccagccttcaaccaagctcaagctccgctgggcagccacacggattcggggcttgcatggggacattctgtgtctgatttgcctacgcaggactctttaatgaaacctctttttccaccacgtcactctgaccaattacctttccatgcccgagccaaccgtcccctatcgggcctttcgcagccactgaacaatgagcccacaaattggtcaagtcgcccactacatggattccaacccccagtccctgccgtagtagcgaacgcggatttcaaggagaaagtcctatcggaggctcacggtgtctatgttgacctcctcgcaaccatccaccacgcccgccgcaacagcaatagtaaggctgccgtggacggttacccccgattcttgaagccgagcatctaccctaaacccccacgacaaccaggtctcgacttttcacaagcccctccgcccgacctcacacgtcataacagttacccagctagtcaatatgacttgcaacgccagaaatttaatgtcgcaggcagccataggtcgaacgatcctacatctacttctcgcgtccagactcgccgcccatccttgaataatttcgctcacagcagagggtcggatacccatatgctcggattgcgtgacacgggctgtccttcaggagtgccgactttcaccaggactcgtggctctctttttaatgagggctcgcctatgtccaatgctgcatctgcattgtcaatgctgtctgacttgtgtgcggaaagtcgttgggaatggatcgacggaatgcttctcgggggttgtttagcctatggcttgggtgattatcacaaagccgtgcggtggtattccaggatcatcgctcgtgactcgacacacgtggaagccatctccaaccttgctgccaccatgttggcactcgatcgccgagaggaggcttcgcaacattggttgcgcgccgtgcaactacggccgagcttctttgaagccgttgaacatctgataggtctactctgtaatagccacagaggcagagaagctgtcaacatcattgattttgtgcagacttcccttcgtcatcccaaagacggcgattgcttcaagacagatgaacatgctagcgaacccgagagtgacgctgagagcaacgtgtctgatgtgtgcatgtatgacaaagcatctttcgagtatgatgatgagatgggacgaatgcagggaatggaacctggctcaccggatgctaaaccccttggttttgcgagcagtggttatgcaatctcaggtgcggagaacgggcgaatgctagctttggtccatgccaaaggtaatatgctttatgctcttggtgataacgcgggagctgcagctgcatttgaggatgccgttctcatcgccgctggccgaagacgacatggtatccaaagcatcattaaacaaatttttgccgccttttctagccctccgagtaatgggtattctcaatccgagaaggagtcccaggagagcattctgctctatcctgatacagcattgaaaacagccaaacttgttttcccagcaggcggcatgccgccggggctccaataccgnnnnnnnnnnnnnnnnnnnnnnnnnnnnnnnnnnnnnnnnnnnnnnnnnnnnnnnnnnnnnnnnnnnnnnnnnnnnnnnnnnnnnnnnnnnnnnnnnnnnnnnnnnnnnnnnnnnnnnnnnnnnnnnnnnnnnnnnnnnnnnnnnnnnnnnnnnnnnnnnnnnnnnnnnnnnnnnnnnnnnnnnnnnnnnnnnnnnnnnnnnnnnnnnnnnnnnnnnnnnnnnnnnnnnnnncccccggggggcgcccccccgccggggctccaatacgtcgccgaaggtattgctcgcaatgcagcaacttccaccacgagcaattctctcctttcattggcgaaaatttaccaggatggcatgtccaacgttggatcctcaggacgaaccaggtcttcccctggtgtccgggatattttggccctctattatctttccctctccctacaacctagcccgtccactgcaaataatgttggaattttgctggcgggcattcaaaataacccaccggcgagaggtttggtgcgttcgaaaggtgagactcagcatcacctcgagatccctggagtcatccctgggagtggaatatccctagccttggcatactacaactatggcttgcatcttgactcgcgacatgcccatttgtataccaacctcggcagcctactcaaagacatcgggcagcttcacgccgccatcaagatgtacgagcaagcggttcagtgcgatggcaacttcgatatcgccttggctaaccttgccaatgctgtcaaggatagcggtaaagttaacgacgccattgtatactacaagcgagctgtcaaggtcaaccccgagtttgccgaggcggtgtgcggattagcaaatgccttgaactctgtctgtaattgggtaggccgtgggggcatcgtcaacgctcgtggcttccgagatcgatggcatgttgatgacaaaggaatgcttcgggattcgctcaacatcgatacgggctctggatggatcaagcgggtagtggatattgtcgaccgacagctcaaggaaggcgaatattggggccgtggcatgttgactgcgagtacggcagagcaattgtgcctgcaactggctcccgctttggaatctactcgctttgcttccagccatcgtatctctctggtaaagcttttccagtcctgggccggacagaaatgggagggatctcgactcgtacgactcgtcgagcgagctatccggtctctcacttggcagtggtatcaggatcgctatgttttcggcaaagattacccgctttccaagtatcgtcgacctcaactcccaggaggtctttctgccccgaatgcacctaccgttctgcctttccataccttcacttgtcccctctcggcgaagcaaatccgtcagatctcccagcgcaatggactgcggatttcaacatcgactcttagactcccctggctgccatccaccgtcttccctccaccgtctccgcctagtccgtaccttcgagttggttatgtgtcatccgacttcaacaaccatcctctcgcacatctgatgcagtctgtgtttgggctgcatgattcctcccgtgtcaaggcgtactgttacgccacgacccccagtgacaaatcggtacatcgccagcagattgagaaagaggcccccgttttttacgacgcgagtggatggccagtcgatcgactagtccagcagattgttgcggatggaattcacatcttggttaacctgaacggctacacgcgaggagctcgcaatgaggtctttgctgcacgcccggcgcctattcacatgtcattcatgggcttcgcaggcaccctcggtgctgagtggtgcgactacatccttgcggatcagctttctattccgccagagacattgagccccggacggcgcaccacacggatcgaggatcgtctcctggaagaagacaatggcgaggaacttgaagactgggtttacggcgagaagattgtttatacccgtgatacctttttctgctgtgatcaccgacagagtgccccagatgctggcgaaaagcacgtatcctgggaagaagaacaagcccggcgttggagaatgcgcaaagaattattccccaagttgagtgatgacactatcatcttgggtaatttcaaccagttgtacaaggtcagtctatttgcgaggctcatcccaaaccacataactaacccccttgcaggttgaacccacgacgttccgaacatggctgcgcatattagcgcgaatccccaacgctgttctctggctcctccgcttcccagacacgggcgaacaaaacctgcgagacatcgctaaagcctgggccggcgaagagacggcatcgcggatcatcttcacggacgtagcgccaaagaacacacatatcgcgcgagcgaaaatcttagacttgtttctcgacacgccggaatgcaacgcccacaccaccgctaccgacgttctctggagcggcaccccgctacttactctcccgcgctacaagtacaaaatgtgctcccgcatggcgagcagtattctcagtagcgcgctccccaactctgaggctggtcagcgcgcccgtgaagatctcatcgcctcgtcggatgaagattacgaaaataaggccatccgcctatgtctggatctgcagtactctggtcatgagggctatgcccgcggccggctggcagatatacgacagatactgttccgggaccgctacaagaataagctcttcgatacggcgcgctgggtacgcgatctggagaatgcttatgaggccgtctgggcgcagtgggtgaacggtgaagaaggtgatgtctggttatgatgtgcactgcgaatataccccttgagcgatttttcctttttccttttcttctgttcattcgcattctattttgcatctacctcgctcctaccttccgccctgggtttgagctggatcatttatgtaatgaatttactttttgcatgtggctttttatgatgtatacgtacattgggaacatttacgaaagagggtctgtcggatggtttcttgggcaggcgtttatgccattgatatttattctctgggttcctggttatgacgacctgtagtctttgtgatttcggtcttttggataaactgaacagcataataggtctaccacaaccttgatccagtgcaatcggcctaccatttcctctgttaatgatttacaaacgcatctcagcaacgaatcacattgtacgggcacattatatggtaagctcgacccctatacttagcagcataatcacatcatatccactcatctaggaataagctgatacccgctgtctccctattgcggtatgcaggatcaagccacgaagccttcagccctgaaaatccctgtttacgattggtacgtcgcccccggcgaccaatagagtcgacgcccgttccagccctgagtcacaatccaagacattcattcatgcgccgagacagcaggccaatcaataccttgatgttggcattggctttggacggagcacaacaaatgttctccccgcatgagcctatcacagcatcacacctccctatctcgtctctctacgatccaagctccatgtcttgagaacgccctccctcccgtctcgcgaggggatggcgtaccaattcggatatcagcatcctatttaacccacgcccagtccaggtctgggtccagatcgacgcccatcagccccaaaccaaaaaccagaactcaaaagccaatctactagcgtgacggaggctgaatcaggacatccgcatttgcatacaggcaaaaacacgccacgtcttcggctctgttgcacattacgcattgcacagtacatacacccctgaaactagtggagtaagtagaaagggcgttaagccatggtctatatcgacatctatctattcctacagagtacacatcatgcacataccccggtcgacgcggcatggcattctggcattatattacatgtccacgccctcggactagggagtaaagtaagacatgcgcttatccgtcttttgtctgcaggttgccaggttgattcccacatggcggtgtccacgcgcgtcgaggattttgagattgaccggtagggattttggtgtgtatatatatagagtgagtgagtgggtttggtttgtatatacaacatacaggtacaggttgtcagagatagaggaatgacacaccgacaagtacttagaatagacaaaatggatacgatgtatatgacaggaagatcaacgacgaacctaaatccgcccgtttgaataaagaaatgccacgttgaaattttaataaaacaatcggcagatatcctaccactactccgtacccacccaggatccccctcgccctcatatccctacatcaaaatacaaacaataaccccctacccttcccatatcccttatcccttacatcacatcgccctctcgttgtcgattcccgtcccagccaagtaagcccgttcgcttcacaacgcccacgagagagacaaaaccatgcaaaccgggaactcacctgtcccatgtgccgtgtcatatctaccagccctagcaggatcacccggttgtccgtaattgtcggctatggagcgttgtgagtggcgtggcgcgggtggggaacaagccacacagatttgtggcgttggatcggtcgattagccgcacagaatcggcacctggagccgaagaaggtggcttgttttgtttttgggcttgtttggatataagatgttattgtcaagatgttattttgtatgcggtacgggagttcaaacaaatggcggagttagaagtatggattctagaactttgacggaggaggaatgatgtgttttaaggcctagagggtccataagtagtccgacgggcctaattgggaatgtgtttcgcaagcaggtgttacttgaattagattagaacaaatgctatactcgaatgtcgcgtagttgctgctcctatacataaccctattaagccgatcacatgtctaagcaatgctagttaactaactagttactctgacaagattgcatcattagcaatgacgatcagcgagagcgagaccgagacccagacccagacccaattccaagatctcttaatcccgagactaacgataaatctggaagccaaggtcaagccccccaacaacggggtggccgttgcgtcacgcgccctccaccatccctgcaagcccgtctcaccattcccctgaaacgaggctcaaagaagaaaaaggggtcgccaggatcattggctcaggattctgtatagattgcgcttcatttcgcttgttgcaacacgcccccccggaaaatgttcgggctgcggagggtccggtggggagacgggaatttctgctatggcatttgccgtgggccgtgggcttccgggcttattggaaaactgctaccacgatgacaatttggcccccaggtctaaaccgcaggatttgaaaggtttcttggggctttgatcgtctaagggtaacaatgaaatagaattccgaatgactgggttctttgtctttggaccttagctttgcgggaacgattgagtttggcccggatagatagggttggtgtttacagtcggactttgtatacggagaagtactggttttctaggttgtaggttgtccatgttgtcaatacatatttgcacatgttaatctaatttcacaaatagatcttctcaaatggttcgcggatctcgacacttcaagcggggcgcatccgacgtaaccacaagcttttccaaggttgtcaacttcagacttgcggtttgtgatatctccatgtagtacctgtttcgtagatcgtttgacaacgtacggagtacatcggttcgttcagcggtggatctatacagacaactatatgttgtacaacatctgtgttactacagcagtataccagaggtagtcgctctgcgattttcgaaatctgctaagcaaaagattgtacagagtacagagtaagagtaagagtgtgacagcgtaggcccaaacggtttcccacagatcgggcaccatgcgagtggtccccgatatctaaagcccgagaagatggcccaccaatcaccgtctaagctgccggtgtgtcatggccgagcaaattcaaattcgagggattccaactcagactcagatttaacttcaatctcctcgatcgatttcctgtagcccatgcaagttgcgtcacttggactgtcacggagatcacgggttggttccttacgcctccatcttagactgtgtctgtactctgatgatccacctcgtgttgtatcaatgaacatatcacaaaagttacatcccattacccaaaagggaatggaaaggacgagggtggcgatcggtgaacactggctatagctagagaatgtagaatgatccatgatgtactcggcaccccacacggagtactccgtactccgtcagctttgcacgatgattttctctatagacttgcacgtcagcgtaagcgaggcgatcgttttaataacatccgaatcggggacaatatattgtccccacgtgacccaaacggcgaaaaagggggccacaggaacgccgtgcttggacccctgcaaagccatgcggaaggcccgacagtcaggaaacagctgcgagaccgttcgctccacatttagacttcttagtgacgggtactccgttgagcttggatagatgggttccgggtgtttcctgggagtgttggtgttctagttgtgctcatgctcgatcaagtatctagttacttactctctcttcgtctactgacacactcctccaatccccgtactcaaacagccgatctaagctcgagtgcacggggcgacgtgatcagcgatgatccctgcaggccgacagggatttatctcaaatacttgccgtgtctctgattggcgaagcgacagggggggggaacaatagtctatcttgagtaaactaagtcgggaaaacaacaaatcaaaattaattaaaattcaaaatctgacaggtccaatctcgggtacaccctagtcgatgttgcattccaggacgacgggttcatcctttcagaaacggcttttcccaggagtacggaaatccgatctggccgtccacacgaggaattgtccacatggctacacaagaactttccctttttgtatttttgacttctctacaaccgtgttccatggaatatacagggatacaaccttggaagcccaggggaaaccaattaatatcttttctccacactctcagttttgaatctatagatagtcccgttcagaggttccaatcattaattaatggttaatctagacaggtggaatagatgaagtgatcgaatagattaaagatttgaggaggcgtctatcggttaccaaataggaagtcccacactcaccatgacaaatacctgggggaccaatcaacttcccagttcttccatatggatctatgcaggtaaggtatgcccctggaggatggaaattacaatatatacgcattcggtacgtattgctgtatttttaccctcccacagtggctgtgctcacccaagggttcagagccataccgtctggtgacaaaaaagcaaaaaaaaaaggtgtggcttgcctttcaacggtttccaccggtggagatctcctctgctgcgacatgcctaacggggcagtctggaaacttcgcactcgtcgatcctctctttcgatccgatctggcgttctgatgcatccatccattgtttttttcttggtacaccagtgtttggactagaaatagtcggtgggctgaaggggacgggaaaaatagattgacctatacttgcgccgttacggtctgggaacaattcaagatatccacatgcgcagattagaatggataacgtcacgtcccgtgtctttgcagctgtctgaataaaaacgacatcggctttaattcagtttccgcccccctccaggcgtcatggagggatccacggtcaactgtcagtgacaggtggcaggtggcccatgcttttcgtttaatttagtgttcttttcttggaaatggattttgataatataaaaagatccaggattaagcgagcctcgaccgggatatagaacagaaaagcaaaaccgtcacgtttgtgatggggtccaagccgtatggaagacagcctgcaaggcatatcacaatgtgccatggaatccgtagatattgtacaagctgatcgacgtcttcacgaatacctcatacctcggggttgttcgggctagagcttttatcacacggaggccccgatttccccatactattgaatccaaaaaagggataaaaggataaaacaataaaacaataaaagaattcctttagaaatttgtcaaactcggtccaccggtccactgctccaccgtggatcatcgcgaggtcgagaaggaaccctggtcgagccaatgagatctcggccttgaccgatggaacatggatcggatatgaatcgaggaagtgttgtgcatggctggctgagtggaatctgggacgtctaaccgcttgtcactcggaagctagatctgcccctggctgtttttggcgtggtatgccccctttctgctttattgttttattgttttagttatattattttatgttagatctataattaattcgtaggatattgtcttagttgtccaattgtcaaacgactatgttgtataccagaatcgaaggctgcttctataacttgcaaatccaaggagctagaaaatcaaaacagttagcgccttgatgatttggaattccagcaacggggctcagggtcgatcactccgatctttttctgctttacgcgtctttcctcagcccgaattcccgggtggtactgaagatcctaacggagtatttttccactccccacgatctatagattacaatagtgtggtatttatttgattttattttctacatgttttaccttgcctgtattattccgaactgtcagctccgagatcttggatcgtgatcttccatagcgggacctgtatttttttcttttggacccgtccccctggtacttaagacttgactactataataacctcttcgtctacttatacttcaactctctttcttctatcatcatatcatcaccatcaccaactaccaccatctaccatcatctaccaccaccattacatctaccaccctactactctcataatgcctgcttcacaccgtcgtggtccttgggtcccagaggaagaccaactcctcacccaactagtctgcgaacaaggccccaacaactgggttcgcatctctcaacacatgcactaccgttcgcccaagcaatgtcgcgaacgttttcaccaaaatctcaagccctcgctaaacagagaccccatctcccccgacgagggcctgatgatcgagcgcatggtcaatgaaatgggaaagcgctgggctgagatagcccgccgcctcggcaatcgcagcgacaacgcagtcaagaactggtggaatggcagcatgaaccgcaagaagcgcggcctgtccactcccaccacttcccgcacttattcaggccgcatcgaggcaccctacacccgcgcctcggcgatgagcccatcgcgctctcgcttctcttcttcctctcgcccctcgtggacagagtccatcgaatccgctatctctgaacaatactcccactcgcgccgagaatccatggcttcttccacccgccatctctcccccatctacacactcccctccatcaaccgaccaatcgagactcccctcacctcgcctgctttctcagaggcttcacactccacctcttgcgagccgccttctatggtctcagaccacaattccgtctgttcttcttcgccccgcactttcccctctccgcaactcctgcccttgcccgtcgacctgcgctcgcagtacgagatgcggaggcccagtgtccacgttgtcgaggactcgcccagttacccggctcgctcgctcgagtctctgtcagagatcgcctccacgcagcgctggattggccaccagcccaccctagcctcatggcaccagcctatagacttgcccaagtcttggatctccaggtctgagcctactcgtgacactcgaatggggttggacaatttgctcaattgaaatatacctcacatcatgattgttacgagtctcatttctcaactctgttttccctcgctctatactcctgattccccttggcgctcgggtccatcgatggaacccttcctgtacatttgccgaaagctcctccattttctttgtgtctatgctctcttatagggaggtattatgattttcttttgtatatcttaatgtgtattaccatgtcattttcaaagtctgttcttttgggccttcgtgctcggttctacgttgaatgattattttgcctattttgctgtttgattaggcacgcagtctgggctctctatttctgcatttgggatcgcataataccctgtttatagtaaggatctaattgaataactaataataataatatctaagcatttcactccctacccaaatctgcattccgaccctcctatacacagaccaccgcaagtcgcacatatacgaatgcctctgtactcccacacctccccggttccagccagcctctcgtctaatattgcagattgcaggcatcagggaatgcagtcatgcagcctccaaccgtttcgctctcccctttgcacgggtccccatgaggaatgcgccaccgggcacacgctgtgctcacgaggacggacgcaagggatgtgagagcatgaggcggccctggttctggttagggcctacgcacggaagtaaggacccacccgtctgtctgacaaggcaaggtttgggatacagagatggaacgtgggagattgtagattggaacttgtatagtgtctatgtattgttgcagatgacgtgatgattgatgtttatgcacatgtatactagattccagctagggatggccatttcgttttgggaaataggaaataggataatacctaatgctgatgctgatgctgatgctggctcatgtatggcctgcatccagaccatcacgtaatgcatacatgtacataatgcataacccatgaataccctgcacagtggcaggcaagaatcagacccggacatgacacacacctccaggaaacaaaagaagtctattcgagaggttcgtccgcgcctgcaggagaaaatggaaaatcaaacggtctggcaccgtctcgatctagagtaagattgacattgacggatccactagaggaatggaggatatgtggggctgcctaagctgcctaatacaacgcattaacctaaaacgcagagcgagagagagagagagacagaaagagaaagagagagacaaagagagaaggatgagcggggaaagaactatattcagtatgtacatattccgtataggaactaggatcaacgccacccaaccaggccagggtacggaatagagaccttgattatcccgcctatccgccccatttctctgtgaatgaaaccgatgcgctacggtggtgtttcgctcggatcgcccaggacgggatgagcgttgggacgagagccaatcagcggaggggtcgtgatgcattaggacggatttgtcaccttctgacgggatgaacggcggggctcttggtgttgcatggatcgtggagatgttcatgcaagccctctgttttgttttgttttgttttttttttttctttctctcttttgtcgggtctcactttccgcttcccccgtgaggctgtttggtgcaggttgggctttggccgttgagatttggtttttgatttaatttggtggttgggttggggtatggtaaccatgtttatgccgtttcatcgtggtatttgggtctgtttcatttgatctgtttcgagtccactataggattatcatcgtctattctatcaaatcatcagctccacattaggatggcgagatgatggcagctatcgcttccacacaccatctcgaaaataattgatcggatattatctaccattcgtcgaatcagatcgagtagattgacttccgatgtgataggacacagtagctcggtaaatcataagctaattaggaattctatcttatacagtaccttgtatttcaacattggcattgtgaagatctgcaggctcccagtatgtattgtgcatcttttggcttgcataccgtccatactgtttgtttacttaccttttgcctgtggatccgaatgtgaccgtggaactcacacggcaggaaacctgaatctcaagggcaaaacaccccaggaaactctaattccttgatccaaagcatagggcaaagaaagttcaaggactgccgctaacactgccctgaccaccgcccggcacctgcgcacgatggccaaaatgaaaaacggcgccaaggccagatcagatcgtatccgtttatcagtggatattaatatacatagcattagttaccatgggagaagggagcaccgtgccaaatacatatattcatccatggtttgccatacacacgttgcagctcgaatccatggattcattcttctgccgttgcattccaagctcccgatcctgtgatcgacagccacatcgccttatagagcagtcatgccgggatcaattgtgggatccatccatatgcgcaagagctgagatcgagattcggacaccgatagattatcagcatccatagactttggatgttactttatttggtattacgtctgtactgataatacagagctctctgattggcccacggagaatctcggtgtaatcccacgccagtcctaaaatagctctagcgcagaaaggtacctgtctgtcggtacgcacgatggctgccgtcccctgagcatatccgcggacaaggtgtgaggtgaccgttcctcgggacttttcccgaagtcaaagcctccattttccagtgctgctaaccgtgcaagtcccttcattttcctttctgggtaattcgctccggtggcggtcgtaggggcttccggcgctctcttaggggcgccagctcgcgtggcaggaatccgcaggattctagttgacagggttgtttgaagtctcttgcttcattgggatgctctttctgtattgggtgttttttttctttgagggtttctaacggttgcgtaattgtttctgggattttgagttcaagtggagttgtttatggagcccgtactatctatcgtcacgcttgtactccgtagatgcacaaccgacaacctcaggggttattgggattattgacgtggtccttcctaatacggttgaggagttttactttgtgatgggattatagtttactgggacaatgcttagcaacggtggactagcaaatgttgatatctagaaggagacatggtaagtcttcccctttactgccgacagaagacaggcatactctgaatcggacattcgatctcaacatcgcgaccgccctcatacacagtatcttttccgtcccagagcttccacgatgccccagccggcagatagaccttgaccttgcgctgaccgggctcaaacacaggcacaaccaagtacttcgacccaaacatatactgagtctcgacctcccaagctggttcatccgacgggaactcgtaaaacaaagtcctcatcacaggagtccccttctcatgagcctcccgcatcaacccgcgcgtgtactcgcgaagctgctcgcgaatcccaatataccgtttacagatttcataaacctcatccccatatgaccagatctcattatccgccccgctagccgtcggccgtccctccggcttcggctcacggtcaccatgtagccgcatcaccggacagaacgctccccactggaaccatctcgtgaacagctcgcggaacgcaggatccttggggttgccgccgtggaaaccgccaatatcggtcgtccaccatgggatcccggctagccccatgttcaggcccgctgcgagttggttgcggaaggagctccacgacgacgcgatgtcgccgctccacacgagcgctccgtacttctgactgcccgcccatgcacaccgcaggagattgacgatgttcgtttgaccctctgcggtcatgccttcgtagaaaccccgggcgtactctttcgggtaggtgtttccgacctgcaggttgctgccggcgtggtagcggtagatatcgaagtcgtagatcgagtactcaggctcggcttcgtcgagccagaatgttttgatacctatgttgtagtagttttgcttggcttgactccagatgaactttcgggctgccgggttcgttgcgtcgaagtgtgtgatgtcgccatcgcattgcatcgctacgcgcatgccgcggtcgtgacggatgagaagcccttgttcgagcatctctgggaagttctcggatgcattttcaacggtgggccagatggaaaccatgagctcaactttgagctctttaagctccttgaccatggcctctggaatcggacattgttagcgggtcgtgctatcgatgtaaaaaagagaatgacagctcacccggatctggccagaactccggatcaaagctccattctccttggtgcttccaatgaaagaagtcaatgacaatcaaatccagaggaacctcgcgccgccggtactcgcgcgcaatttcgagcagctgctcctggttcgtgtagcggagcttgcactgccagaaaccaaggccatattctggcatcatgggaacataacccgtcactttggcgtaggcttcttcaatttccgcgggggtgtcacccgatacaacccagtagtccaatgccttggtcgaatacgcctcaaagctcatgatatttgttcccagaaccgcccgtccaatgccggggttattccagaggaagccgtagccgagcgacgaaaccgcaaagggaacactggcctgggagttgcggtgcgccagttccaggtccgtacctttcaggttcaggtagggctgctgatactgtcccataccgaagatcttctctttgcgatcgagagactcgaatcgcatcgtgaggtggtagtcgccgcctaggattggacgcatctcgcgagcttcgatagtcagcgcgctgcacttggggtccattggatccaggcggtggcgggcatactcctcgaggagtttgtttcccttcgaatcgtagacgataatcttgcctctgcgtgacacagttgctttgatcttgccgtttgtaatagtcgcttcttgatcagtagatatctcaatgcttaggtttgggctgggtggcttggaggagagggcccaatcttccattggaattgacgcctgtctcgttgcacgtacgcggaaggcattctctccccatggctgcacccagaggatatggtcgtcgaaacggaagatgagcttgtcatcttcggtgtagagcattttggtaaaacaagttgttagtggtattaatctacttttcctgatggaagaagaggcgatttgtcttaacagatgagctgtctagttcaaagagccgggaattaagtattgagggaatggaatggtacccctcaccatgcaatcctgatgctgtgacagggctaacaccgatgacaaggcagatccactgcatgaagtaccagtaacaacactcatttattcgaggaaacttctaagatgcctcaggggtggtgaggtggatatgtgtacctttaaacgcctcgagatcataggtagcatccgtcacgagtttagcctaaagtcggccttccaaatagagcaaggacatgactccgtgtcttccaaaagaggaagtttatatcgtatgaatgaagctgccacttatagtcttcattatgtgctacctatccgaggaaaatgttcaatgatagtagatgtagaaaaagtcattagcaatacgagaaattctttatgtgggaagttggattggaaatttaggcttgggagctgcagcatatacaagccattgtgtgcatatcgatgttaactagttaaatgcctatcgaatttggtgaatgagccaacgatacgtcttttatcatgaacaatatcaccacaagaactggttcttcggtaaggagaaataatcaaatatgtggcaatagttaggagttagcgaccctttaagaaaggagaaagagaaggcatctcttctgatccaacggtcatttcagctaacatattaccaaccacaactttgaggtaagactgctgtaggtaggccgatatcacagaacatgagtatatgagatgtagggttatgtaggattactacgatgtgctattatccttccgtggtctactattgctacgtattaacatattccggaatctcgtggtcattactgactactcagttctaaacttcataccttctttatctgaatttcaggagatcaaagaagcccctagttttgttctacaaagagagtcctttagcacataaacctatggcagagaagagatgttagggcttaaacaacttgtgtataatgcaccatggctagatctcaattcatatggtctatcagttttgttggaagataattccctgtgtttggccaatttatcactatagtcaaaatttgactctcactttcgccttaattagacgtttataagccaatacagcgtacctatgaggtatagtatttcggtgccgagagaccatgttaccatccctgtcttccaactcttcttttttgcttaaactttcaagtatcaaagcaaatcagcttgagctcattcgtaattcatcatcagacccaagattcaacaatactaaaccgttcagacgtccacgggaggttccttgatattgccggctggtgttccccggaaaaaggacgctattccttatcaggacagagagtcaagctaccagcgggcacggttttcatcttgcattgctcatcctatccccttaattgtcaatctcattcgaaccgctagctgagatcatatctgagccttcgattcatccagcgaagcctgaatcatggcattcagcggggccgccgaggctcctaccgcggacatggacatcgacatggacctcgacctaggaccagagcccgagcccgagctaattcaggtggtaagggtttgcttttgtctttatagctatagtcgattgtcaactaacatgtgtcgagtgctaggaaacaactccgaacttagaaatcaccgtcgaccccctcaccgatgaagcggtctacgaaaaagtgcatgttcgcggtgtcgatgaaatgaccacggagaatatcaagcaatttgctcgcgactgctctggacaggagccagtgcgcgtcgaatggatcgacgacacatccgccaacctcgtcttctcctccgccgaaatcggcctccaagctctcacagctctcacccaagtcgccgaggaagaagacgcgtctaccttgccacctctgcgtctccgatcggcgaaactcctctcctcccaccctgattccgtcctccaagtgcgatcggctgtcaagtcggaccgcaagcaagcacgcgctcatgagaagagtcgcttctacctcatgcaccccgagcatgatccccgagaacgcttgcggcaagagtttgcggacaggagacgtagcgatgatgcaggggatggcgactacagccggcgcagattcgacgaccgggagcaccggcgccgccgagaccgcgccgaggatgaccacttcaatgcggacatgtacggtgataatgttggctctgaacccgagcgcgctcggggaaagcctagaggtcgcggccagagagagctgttcccagatgccgagggccgatccagtggacgtctccggaatcgcagtgcgtctccaggacgagacacgttggaggaagaacttggagttaatcgaggcggtggtgataataacaggcggttccgtgagaggtcgcctagaggtcgtaagaacaaaagtaaagagcttttcccaagcgcgagcgagagcgagtcaggaaaccgcgagcttttcccaaacaagcccacatccagctacatcaagaaagagttgttgcccagcaaggctagtcaccatcgccggtcagatgcattcgacgcttcttctgccccgggcacctctgaacacagacgccacagcaatattgagctcttccctgattccaccaacaatggcgcccgcattcgtggagcagccacaaccaccgaggaccaaggatttgccatccgaggcggctcatcgagcggcatgtcgattaaaggcaagggtgcgtcggtgcgcgagctgtttccttccaaatacgacaatggcaccaacaataacatcaaagttggcgccaacgctggcaaggaattgttttctgagacactagagggacgcggcggtcgtcggcgtcgggctgaggatatgttcagctgaatagactaagcgataggccgagaacttgtgcatttgcttgattatgaggcttcgggagcatggtggatatccggcgtttcaagaatgggatggggaaatcgattgtctgataaaagtttcataatgaaacatactctgctctgctgatgggtggaacccgtatattttctgtaatctccaatataacgcaaaagaagatatagaccaaagtaacattagttgagtcgtgcatgggaatatatatacaagtcgcgttgtgcgcgactaactctccccaaccaaaatccttccgaggcatcagatacaagcatggccacctccagaacaattgatgcactagcaagtgctatagttgcgcgattcctgcgcaacaatgactattcagagacactgaaggcttttatccgcgaggctgaccttgctcctgacgtggggcagacctcgggcgacgacaccaacaactggaccatccaaagtttgcttgaagagaagagcacatatgaccaaactgtgaattttgaaagatatggaaaaggcaatcagcagtcgactttatggagcgagccaggtgggttttattccggaatggcagtcgaaagtcattgggactcggcctagctttaactatcagcggttgcctttgttctggtatctgacagacttctagcaccatcaagaccttctatcatccagacaccgacatcatcaaatatccttgctgcgtcggtagagcaatggcagaaaccccgcggcgatgccgatcaagtcgccgcagacgctgcaccagcgcagtcgtatatcgtctccacgggtgcagacaggcaagtacatttactccagacggcagaaggtaatacggctgtcaaatcattctcgggaatctctgattcgcctgttctatcggttgtctcgatcctccagggccagtacatcctcatgaccaacatgtctggacagctgctcctccagcatggatcccaaacactggacagcaggaaggaccacgcaaagtacgcagtgaaggtggtagtctacaaagacaaggctgatccttccaagtggtgggttgccaccgccgggtgggacgagtgtgttttcttatattgcctcaatattcccgacgaagtagacgcgctatctctcacaattggtgagcccgttgcacgcattaaactcaactcaaacccggattcactattgttcgtcccacacgtggacaccaacgagctgctccttctcgtctcgcgcagagactcgacttatatctactactaccaggtagaagcatcggaagaaaccgatactcgtgcaaatgatgaacccgctgccgagaagtcaccgcgggaagctcgcctccttggacagcagaatctggccccccattccaatgcctgggttgcgttctcgccggtccacatggcgctcagtccacacgacccaggcctcctggccgtagcgacgtcgacattgccccatttgaaagtgatcatcgtgcgtctgctattccctgcaacgaccgcttcagaggacccggtgacacaggcgtctcaggcactggcaacactggaactgcagaaccgtgaggatgctgctatcctcgtgcaggcaaacaccttctcgccgcaaactgcttactccacaccgcaagtggcatggcggcctaatgggtctggcatctgggtcaatggagatgatggtgtggttcgtggcattgagacgaagacggggaagatcattgctacgttgaagggtggtcatgactctggctttaaggtgaggactgtttggtcgggtcttgttgctgtaccccaagaagagggtgacccggtctgggaggaatgggttatcagtggtgggtttgataaaaggttgattatttggaaggtatgacctttgtgactataccgaatatccaggccaatacgagtgtcatggacgtgaaagcaaatgtgaagtagaggtaaacgaattgatttagacataactaaatataaaaacgactgttactgtctacgggatgtagcccccctgaccatgaaccctgtcgcatcgagaagaatcaagacaggatatatagcaatcggggacttgggggttcttcttggcacgttaagaaaaaatccttcagcaatcgcgcatgagaaaagcacgcagctgtacacacatatgccggacgggagttctgggaaaaggggagaaactaagctcaagggccacaacacagacgaagttgagtcctcgggtctagaagaaaaaaaaaaagaaagggatatagcagaagagattccgcttgggaaaatggcaccgctgtgcacatcgaattaagcctgttgatttcctgatatcaaacaactcgaggctcgtcgcgcaagaaataagcaaaaatcaggcctattcgacacagcggaccgtccttgatcgtcacacacgttatgttctctggacctcttgcacgctcgagttgcatttcatgtttcccatttttttaagactgagttcataatctatgcgacctcgcgcttgccctccttgcgctccttctgttcaatgtgtcagtactccgttccataggtaatggatggtgggttcgggttgtggtcaacgtacaagggccttcatggtgccgtggagagcgtgacggtggttgcggcggaacttggggtcgacaccgttgagggaagggtaacggttggtcttgggcttcttgatactgttcggacaaatatatcagcgactcgattcagggtgagatggtgtggcggatggtggtcgaatgcagtggttcgaagagattgcccgggcgaatattccaagtcgttgacctcaagattcatcacgccggataaaaccattcgcacactagcacttcttccaccatgttcattggattgattgaaaaatgtcggacaagtgtaatagtagggtgaccgaggaagttcaagggcaaacgtacccgttacggtgagccttctggctgctgtggtgctgggacgcgttcttggactctgtaggtgaaaatcatgtcagcgccatcgcctttttttcttctctctcgccagcttgcagaggagcgaaagtcatagggtcgtggtaaaaacgtactggccatcttgtcggatgttgtcgctgattgacggtgatagatggagaggagtgggaatagggacgtcaggcctaagaggctcggctagggctcgttccgtttgtgggatctcgcttattgggcggtgtacatactacagcttcactaggtgacttcttacttgcaagattgtcccagaaaacgttgtgctattttgattggtcttgtatcctgttatatttcattttgccgttctacctggttggaaatcggggtctttttaactcgcttttagcagttcttcagtccgcgagtttttctcccttcattctgccacttaatacacgtgacctatatatatatatcacgtgccagatacttccaatgctgtctacgaggtattgaagaagagatttgatttcggaggcgacttgatagtagcaagtgcagtatacagatacaatgtattgtgcctgattactcttagcgagaattcctgcaccaacttgttctcggccgcaaatattacattaggaatcggagttctggcaggaacttatattctaaaatggataaatactaaaatacatagcacaggaattgaatatgtgttctctccttgtgttctcaaaatatgcatacaatgactgtagccaacgcagctcatactggccatggtccggccgttgaattcccgtgccacgtgacccgccgctagggaacaaccggcattccgacttcgacctttgcaacgcaacttcaagacggataatccagcctttgcacgtcatccaccactgcaaaatgagctccttccgctttgctcgctccgccctccgggctcgcccttctttcctcggtgctcccgtccagcgccgtggttacgctgaggctgtcgccgacaagatcaagctgtccctgactctgcctcaccaggtacgtgaacgaagtccggccggcatcccaacatcatagcctaagtactgacttgataattgcttgacagaccatctaccgctcgactggcgtgtatgttatgcttccaattgcgcccgcgtcgacggtgcctccgcccttttcctaaatactgaccaaccttcgcgatcacagtacccaggtcaaccttcccgccgcctccggtgagatgggtgttctcgccaaccacgttccctctatcgagcagctcaaccccggtctcgtcgagatcatcgaggagagcggtgctaccaagcagtacttccgtacgtccgatctttgcgctctgaaacatttcgcaaatctggtctcttgtgaattggaatcaatcgactaacaacggtgctactgtatagtgtccggtggtttcgccgtcgtccagcccgactcccagctcagcatcaacgctgtcgagggcttcccccttgaggacttcagcgccgatgtaggttttttttttcctttccaatgtcgcgactaaagcttactggagcttccttactaggctatccgcgcccagatcaccgaggcccagaagattgccagcggcagcggcagcgagcaggatatcgccgaggccaagattgagctcgaggtatgaacccgcgggactaccggactggttaattactgactttccttttcttgaacaggttctcgagagcttgcaggctcacgtcaaataaatttgatgtacataaccattatcgcctaaaccatgaacctgtagaattatagcagttctcccttccctctaattatacgtgtttattatatctgtctacattctatgcggtagaggcgggagcgcaccttccaagcttggaagttaagcacatgacttgcccatttcatctccaatccccgacccgacggtcgactgttatcttcagctgaccgtgcaaacatggcattcgccaaatcactcaagtcagaccctctgggcatggtggatactcgattgatgatgacggactcaccaatggatggtttcttttcacctctctttgcgccattcaccgggcttgatggaactgacgaaagacaaccaagcagccgccagccagaagcagaagcaagcccgaagcaagctcacggaagcgtcgaatttcgcgagtctttccgtggtttcgattccagccgaaaatgtcctcgacttgagttggatgtcgctgtggataagtaccacgctcttgacggtctcactgaaccattgaatccccaaaacacccccgcatcaaatagcgaacgagggagcatagaggaatctactgagtcgcttcgatgctataaaatggagaacgtacagacgagtcctgcgcctgggacgggggagttcaatttcgattgcttccaagattcgccagaggcaagctttgtttatcaagacgacggaagtgaatctcctaaaccctcaaagttgcgacgcctttcggttggccgccgacagtggatcaaacctcctgttactgccctggcgaatcgtcagccaagcatgaatgccggtgacttcaagaaatccagcaattctggtccactaccgcgatgcgttcgattttctcctcctgcggcctctctgtcttcgccttctcgtgcgacacgtcgtcccctaccttcgattgaaagaagacaggattatgttgcttttcatcgacagaagaaacaacaccggaaatggaagatcactggtcgcgcgaactctcgaaaaagctcaccatgcaacatccctacaaaaagaatcatcccaaagaaccatgatctgcgtgactcgtctctttgcagcttaacctatcgtgaaacaggtcaaacaactctccccgctcgtgttggctcgggtagtgatgcccgggaagtgagagccggcaatgtgggcgacactcctgttgcagatgactcgaaaataacgggtaacaccgagcagaacatccctgcatttcttgctgtttcgttttcgctttacagaaccagacctgcgcctagctcatccattgagaaagcatcaaagtacgcattcaaatttcgaatgactcgaactgatctccctcagcaaccttctccgcatttccctaccgaatttgaaaacatcacttgccacccgatcattgatgacttgctattacacacttgcttcatcatcccggcgcgggttgtactattacctctcaatgtcatcttcgttgcaacatacccattgacaaacacccgggtcggcgttgtaatgctctaccttgccagagctttactgtatctactgacgagaaccatccttcttgtgttgtccaagtgcggagtgtcttgtggctgtcagtggaacccggacacggccattcggactcagtagcttcacccttagggtgagcaattgaggttgaacaagatcgaagcgacatgtgcaccagcgaattccgttcgtatttcctccaaagacagttttatgcagtattctacgcgtaccttggttcacgcgggtgagaaatgagtttagtcactatttgatacatttttgtggccgaaagccgagttatgggtaggaatgaaacagatttttccagaatggagtctcttgtattagtttttagtagagaaattcccactgaactaaagtaaatgagatgagaggattcaattgacttatagggactctccatgtctacataggtcactatcatgacgggctaccaagcaagcagttgtcaagaaggatgagagataataatgaaacaaaatgaattcaatctacacatcgatgcacacccccagagctaaccttagcactcgaataccttgctttagaataaaaaattcacactttaatttcttgcattacaaaattatagaatcgatcctatgcagtctcttctcgctttgaacctccattgattagccttaccacagcatgttaatcttagcgaggacaggccgcaggatatcctgttttgagctgaacatgagatagtcagaaattaggcgttagattatttgtgagggcttctaatctccgtgaacaatgtccgagatcatgggcatctatacctaaggttcaatgtagggtctactgcacagaatattgttcgatattaaccgcataactctctaagctgcactcggttatgcctcaggagaaccccaggaagaataggacagataaccaataccaagaccgggtatatcagcacaaacatgaagacaagaagaccagcaaaaagctagctaacaacccaataaaagatcctttaaatcgctgacatcataaaaataggaatgagaaaggaaatgctaactaaaaaaatcatttcgtcgcctcaagagcacatttaagaaagatggaaaacatatcaaaaaggcatagtaacgtgacataaggtttggggggagggggtcatttatatcaacacggctctgaaggacataactcgttttgtacacgtcgtaagctgagtctgtagtagacacaagagagaaaaaagcagagaactctagacggtactaagaaagcgatcacgtgaattccacaccgtgctgctgctgcctctcttgtcgggtccgggctcgttcagcacgtctgcggcgacgattgttcgcgtaagagccgctcatctcagtaccggtatatgtaggcgaagtgacactgcctggcccatatgggttgctggaaggcgcaggaatgggaggtggcatgctgcctgaaggtgcctgtggaggggcaaggcgagcagcagcagcagcctgttcacgtcgcatctgctcgtcttgttgacgttcgagttcttcaacgcgacgccagcggtcgtggccggcgtcttcgttgccagacaaggagcctgcactgctgttgcgacgtcgagagcttcttcgctctctgcgacgggcctcacggctcgcggccgcttcttcttcggtcagccgacggagtgtcacatgtcgtccgtcattgtgcattttcactttcacagataccggcggggaggcaacgtcgtcctctcggcgccggctgctgctccgattacggcgggcggctgcatctagtgctgccccagcagccgcacctgatgcaaattctgctccatcatgggcgagagagtgacgtgagtgaggatcttcagagaactgctggtggctcgggggcataggcggcatatctgatacaacgctatggacagcaccagaggcgagtggctctgcagtaagaagagattctccatgtgatgcgtgtcgaggtggaggacgggacagatcggtttcagtgagatcagtttcactatacgaactggcccttcttcgtgggtagaaacttcctcctgtctgtggccgtcgtttgctgtttgctctctgcagcgcctcatcttcatcttctcggcgcctgatatcttccagccgccgtttctcttcatcgtcctttttaccgcggctaaacagtcgcttcacggcagcaaaagcacctgcacccagaacagcgtctctaaccccatgagaagcgtttcgcttaggaggctcagtgagatatgtgctgttgtaatagtaagacgaccccgggctttgggacctgcttggtacacggctcggtggtcgattaaggggcgtgtggtgtgtcggctccggtcgaccatcttctatcctgctgagagattcatccgtgtggctagtactgcgcgaatgggcgggtctgtaacgacccgattcggcatcatcttctcgcttttttcgacgattccagaaattcttggccatgagaccagccccagccagtgcaccaagctcgaggagtttcttgccgaaaccaccaccaccatgatgacgggaagcttcatctgaatatttttcatcagagatagatgtgcgagagtcttcataagcatggcttgggtggcgactgcttgaacgccgtcgaaacattgaagctaggccagcacccgcagcgccggcggcgagagcttctgccgcatgattgccatggtgctctgatatctctgaaggtcctgtataatgactgcggtcatcaccgtggtcacttcccatgtggtatccttcaaagtcatatcggtaggaaagtaaaaagtaaagaaccaagtagccgaaagctgtcagcgcgaataggatgaataggacctttggcgaaccgtagagcgtgagtcctagtggaatttgagcaattccgagaagtagaagtgcacgacccagccaccggtgaacctaagacatgttagaagagcccttatatcccttcttgagacttcacttaccaccagtttcaaaggaacgtgaactcgccgtctcttactctctttcttgtgcacaaaccagccccacagcacctgaaaaataaccaaaacatagattgccaggccgattccatgatgtgggttggttaggcttctttgtggcccaacggcgaaccacccaagcacaaacacaaccgtggtcaagagcagggtaagtacctggcaccaagcatgcaatttgaatgcccagtaaggattccatcgggagtaatatcggattatgaaagttgatattgggacgatgcccaagaaaacgattgttgcaatgacgccgtgcgcgatgattatggaatggtacccggccatatccttgaaacggttccccatgcctgtaaagtgtcagtcattacaagataattgaaagggtgtacaccattatgaaagccgattgttgatgcgtccgactaaccattgtatcgcatcgtctcaaagttgacccccatcaaattgggcagtaggaaggtatcccgcccagagtcccaggtgccatccccaacatgaagggtattggatgaatatgtgctgctccctgcagcggcgagatctgagtttgacattttgcggataattctcgaatgaccatgcgatcttcagtctggaatgtcagatttaccgaaggagatctttcgagatctcccgatccgaggaatgcaccatgcgataatgggatcgagatttcgactggaatgcccaatgacagtcaacgaaactgattgtatgttgaccaatttatgggcgctggactgatcgtatcacaagatctaagtatggttcgagaaagccgtatagtaagagtcgaggcggagcgcaagaagagggaaagaaagaaagtcgtacggattcggatgtgagattaggataggattgaaaaagcgtccgacaacgagattgacatagaataataaagatgcatgtcacacggaaacatcgggcagagaggaatcacaacaagaggctgagcgatttccccagccatctgttttcctatgacaaattaccgggccaaccagccgctgactcagcatgggtattgtaaccgccttccaaagtcggttaggctgttgcctcgttatcttatctgccttatcctcagctgatcttatcacaagattgcgtgctgtgttcgatggagctcgaatcgttacatcccacaccttctcttcttcccccgcctgacactttggaatgagtagcctcaatccaagatgactcctcaactagagatatttattagagctttgtcccggtttgtgaactcctattcgcacccgaatgccaccgggcattatgaacatgactgactaatttaccctagctttttaggatgggcatagtaagtctacgcgttacttccgaggctatatcttatatctcatgtgacgtttgggttgacggctaacttgaacgaagtatgctctgctggtcggggtctttttatccccagccgatcaccaactggagacgcaagtccacagtcggcttatccattgatttatccaccatcaaccctctgggttttgtctgctatgcgatatatacctccgcgtttctctactctcccgtcataagatcacagtatgcggcccgccaccctgcctcaatcgaacccaccgttcggttcaacgatttcgcatttgcggcacacgcggtggtcatgtgcatcataatgtactcgcagttctggcctttcatctggggcttccacgtttcccgcttccaaagagtcagttggttaatggctggaatattctgggggtgtgtcctgtctcctctggtggttatcgtggccgtgttggcacaaagtccggatggagggtacgatccttccacttgggcgtggattgacgtggtaggtgaaaaaatctacttttcttcaatgaactcaacggggaaactgtaaaacaaagctaatatccttctagatatactcgttttcgtacgtcaaactcctgatcaccattgtgaaatatatgccccaagtggcgttgaactacaaacgacaatctacagtaggctggaacattggaactatccttctggatatggctggtggtgtactttcaatgcttcaactggtgcttgactccagccttcaaagtgactggagcggtattaccggcaacccagtcaagctactgctgggcaacgttacaatcttcttcgatgcaatcttctgcatccagcactacgtcttataccgagatactcctgacctgaagagaacatctggtccgagcgagcaatcgcccctcttggatggacaagacgatactgtgggagatcgagtatgatacacagacatccatgagacgaactagtgaccttggggccggatttgagacattggggatatgtgtctatttttgtagaggcagtggagtctgatcttggatctttgagatattgtgggggcggaaatccggaccacacatctcagcccgatcttggtgatctgacgatttgggggcttggtataagccatgatttagatacatgataaaccgtcctatcatgaatgtggtgctatatatttcggatctgagacactatgccaaggaatattattattagacggaagatattcggtctcaccaccagcgtacaatgtacaacgtgtcattctggaagcattcaggtcgaaaccctcccagacaacgtgtcgcacaatacaatacatagttataattcacatagtgactgcataatagacccgaagccacagtgaggctcacgccgatcaaattgacaccgctcctcaatttgaacggcctccccgtatttggcccccaccgaatgatgtgagtggtcgaataaagggataagcacacatttatgaacattgaccaatcatgaaaaagaacacggtctatccaccagtgcaccaacggtgctagccgtcggtgtcgtgctaaaaaaggcttactatcgtagctgaagctgaactctagattctcagatttgacatgagctcattgcgatacctgggttgcatccggatcaaccatacaacatacagaactgccctagagtgactgatcagcaagatatcaaccctagctccctaccagtaagatacccctccacgcaagagatgctaccttcggctttgacgttaccttcaagctgactcaaccttcagaaacttgaattaaaattatggggttaaggagtcggaaattaataacgtgccatagaatcgggaattatgtgtataatcttaggcataatttgtgtagtggccatgacagtgaggctcttgatatctatgaggatgaaccatttccacgtgtttctagagaacatgcacaaaagacaagaaagatattacagaatactataacacgagttttggtgatccctagcatcctgggcgtcttgtggctttctattggccagtaatacgagcgcacaacgcagaccctagaaatatcatagttgattcatgaaaccctaatctctggcagaaacctgccggtcttggtctagccaatcttggtatgtatatgtgcagacccacggcgtcatctttcagccctactttgaaaaagcctgttgtcctatagttctgaaaatgagaagccaatacctgcaagccctgagtgggtcgaagatcatctctaagccggtagacccccccagccccagtaatccagccattctgaatcactttgagtcaaccccaagaatcaatgaaacggtatcaattgatcattcggtgcattgccaataataactggtacagttaacaattctatatcaagcatagcagtatgatcaagtttcaatttcttctgcggaacgcctagacgttcaggattacagcactgcctccttgacttgagatggccataaatactccactgcgagtttcttcttagtctagaagacaagttcagctctaaatcagcaaaaactctatgaaactttggcttctcagtcttatcgggcaaaaaaacccaagcgcatggacacttgttcatacatcctttatttatgagagcgaaatcatactaagcatccattgatatgcaagagcggcggcccccaaaacacagctttgcatacttagactgggaattctcttttctatcctcagaggaattacacaacatcacctacgtccccaacgtcaccgacatcgccaacatgtatcctagtcctcagaagtctaaaagtacatatagcactgtgccggatagtgctggctactcggagtcctcagagcctcaacgaattggaggcttggtcgatgtgcctacatccagctctcacatgtccgttcttcagcagatagactttatgaatgcccagccaaatcctcggtccttcttagctcctgggcatcattctaccgggagaagggaatcgatagacactggtacaattgggtctcaatatgcatggtccactgcgtctaacgcaggcgtcctctcaaactcttctcatatgccctcctttgagacctccatcgaccacaacacaacgcctttcattcaaggttactatccccaggaatctctacagctcgctatgagtggaccaggcgtgtcgggctatactcctcagcaaatcgacaaatggtgtgttgagagcgagccagcacaagacttctaccagccacaacccttccaaaacataggctctatgcgttttccaccatcaacagaagtgcaaccagagccgtatgcgacattcaacaaccaagtcaatactgcgaacgagcagtggctctcttgcccactccattcttctgatccgaccccagaaaccttcttccaaatcccccaatccgtctcaattcctcagtcaaatcagtcagtcccagcgccaacaacccacctctaccaatccactactacgaccacctcaatatcttcatcgccaccatgctccctctccgacccagattctccaccagccgcaccgggctcggcttccggcttaggctcgggctccaacgcaggcgatttaagcaactacggtattccaactggtgacggcacctggcgttgcgcccacccaggctgttcctcgcaggctgtcttccatcgaggctgtgatctgaggaagcacttcaaccgccaccgcaagtacctcttctgtcgctacgagggatgtccccagtctacaaagaatggctttagcagcaagaaggaccgtgctcgtcatgaagcgaagcataatcctggtgtcttttgtgagtgggagggctgtgggaaggttttcagtcgtgtcgacaatatgaaggaccatgtgaggaggattcatcggaaggggcaggctggaagggcttagtaatcggcgaggtcaccatgaagattatggtactttggttcatgtttacccggcggttttttttttgctattttgtttgattggttcatgtacaacattggtaggcaaagcgggaaaaggcatggcaaatttagacaatgaacggttctgtttagcgagggtttaccttgtccatgaaagtttaaacaaaaaccatacgaaaatgtatagttgcactgcttgaatgctagacctgcgtatgaggatgtagatatgcaagtctagaattagactcgagcattgccgagtattctaccgccgtaagaagcgactaaaaatgcttgattctaattttaacgccaaataacgccctaggccagactaatatcaccacctgataataggaatattgaaaaaaggcctgtgtaatcgaatacccgtgacccgtgatcatattatgcatccgagacgtttacgcagaaatagaccagatgaaacgcgcatttcccctagatctattaataatgcaagttactcatcaacaaacagtatgctatgtttaacctccatcatgcgagttcactgctacttagtggaggctatgtacagtggcggcaggcatagagtgaaaactaaacatgaatgcgggcattgttcgattgcattttctatctagggtatccaggtaagaatttctttcttatggtatgtatgtctcgaagctagtgcaatgatccaaattatagcctttctatatcaagaccagacgaggcgaggtgtacttcgtccattcagaacctattaaacccgcctccgcacgttggttgctgccaaataccatctaattagtaaaccatcaatcccaaagaatcgtcttctttggattcgccagctatgcaacttggataacgtggctagattcaaccagaccagggcctccgtaagaagaccaacccagccaggccccggcaacacacctgcacccgaaggatgttaggggaggctgacagcataattctgagtgatgtacttggtcttctaagggtgtgtttcatcaggtaatctgaaactttgggcaacccaaggttccaaggtttcagcttcgcacgtgttccaaggttggtcttggaagcttaactctatttgaaacgtgtatgaaccccagtagttcaggaacaaaagcatttattatagatctctgtctgtagccattgggctcgcacacatccatattttgtgtagatgctcctcagtcgaagacagacttctcgccgtgcgtgcaatatccttgggtgtaattctgcgaatttgtggtcccattaacgcacgaattccctggagtccaagatcccaaccaagcaggatttccagagacaggagcgcatatggtagtcttgtttgcagtatcaccactacgggactcatgaagccaccctgtaatgattgatcgaacaagccaataactattatctgcatgaccactgaacttggtcatgttgtaatgatcagcatcaatgccgcagctctcataaccccgcagaacagccgagtgctcttcaacgatcttgcccactatatcattcatatctttcgattcgtagaaacagaagaccttgagggagaggtcgccgcaatggagcatagactgaaactcgtttccaactcgttgtacgtcgttcgagcccgggtggagagccccgaccatgtctctgtttgcggtgtggactatgttcatcccttttgcgagtttctctcggtaagaagcgagcgaggacccgtactgcggtgtgcccatgaagattatcccgatggcgcttgaagatatcgcccatagtccgtctatgtagttgctgaggatcagggcttgttggcataccagaccgcccagactgtgcgcgataaataggatgggtctgcttgagcactcgattcgttggctgacaattgcataggctagggattggctatggtcgtgcagtcgatctgagaaggtaatcgaggaaaaactgaatatgtcgacgtcgtagccgaaggtcatgatgcgtgccttggacaagtccttggaaagaagatcccggggccataaggttccattttggtgagtccatgttttctcgcgatcgccggtcaatccatggataaaaacaatgctagtttagtggatgtcagttttcatttcttctttgttcatctaatttgggctccttcctggaaagatgaactcactctaggtcagcatctgaaggatcagataataccttcatcccaattgcaccttctgtggggtacctcgacattattagctcggtacctcgtttatctattacgaaatcttacagactgtattctggaacactgggtttcgtcttgctcctgaatagcgataacctcatggtggcgaattatatgtacccgaataaaacaaacaacataagatagcaagatagagtcaacagaagaggcaaacccggatggtaagagagttttaaaattcataatcctgtcggttaaaccacccctgtctggagctgatgacccactggattacacaatgtcttaagtaaacacatttcttaacaccgtctattttacgtccatattgaaatcattacaggtaacacagaaatatgccgattaagctggctgcgttttggctggctgcgaacacgaacctccatgagaataaatcgggccggaaggtcttggtagccccacaggatcgggcgcggaacttttatatcgtaaatggtggaatgaaccgtagatgcatgattgggctcgtctcaagcagggctgttaagataccctagacttaatcgggcattcccggccgcgtggaccaaccggcatattcgggcttctctgcgtttgcatttgagatggtagagagacttgggctctcatacttgaccgttctgatgattatcgctttattcgagaatctgcagccactgggacggatatatagactaattattggatgcttcttttatcaaaagttcgtagtcgtcaatttccaccttcccactttgagaattcggattgatgaaaattgctcttcttacacgtacaatcggcaagcgcactgcggccagcaagccatcaaaacctaagccgtgatgcagatgcagtgactatgcacctaatacagcggtgggtgggttcgattatggcgcaagtgatagacggaagaaaggccctaggcctggatcattgcgataccctagggaagcacaacttggtggctggggaactcttcgaaatggtgaggccatggaaccgatagaaaagtgcgtggaattgagggaggcgggttatagtccggcacccggacttgattgaaatcaccaccaggttgatcgaaggccagaaggttgaatctcaaagggaatatcagatcagattgaccatacgcgaatttgaagaaaagctggcaagaccaatatcaagttatggtgcatcgggaaagagacttctacccgagtgtgattttgaaaagtcccaagtaaagtgttcaacagagggttcatgataccccaatgaattgacaaagaagataaaatagtaaaaataggaaagactcacaatgctccaattaaacgaatggcccatgtaacatcatgaatttctaacaatggacaggtggtatcattgcagaagcaccaaacaaaagtacccaaaggtaacaaaataaaagacagcaaaaaggtatcacagctgagaaattcgtcacgcgtaaagttgcaaagttacctcaaagagggattagcatgtcgtactgaggcgctaatctggaaatctggaacacccggggaacacaggcatgaatgtgggagagagggggtgttggagagggtacacgccggtcggaacgagtgggatagaaagagcatggacacaatagaaatgagttggaaatgcaagatgtaaacaggaatagaatgaaaaaggataaagaataaacaagaggctaaaggttcatgtattgttcatccttcgttttctcccgcgggtgctaccaagcggccgttgcgcgagaacctgtcggagaatgggatcatctttgtttttgtcgacatgatgtacacgaacatgtctgtgtgagcgtgagttcagctgatatcagattaagtgaggctcggatgtagcacgaaccgttgaagattgtcgggtcgcgggtatttgtgttgctggtctggacagaagggacagacgtagcctggggagttgtgcacgaggccatggcgcatcatttcattcttacgcttgaaaccttttccgcctagtgcgcgtggacagccctctaccgggcagaagtgtgggcggtcttgtgagtgcacgtttgcatgagagctgctatttcgttaggtgggggtttcacttgagtcgtctctttggtcttacttgaggagatattgagtttggaagggtgcagcagtgcagccagaatgtgtacacctgtaactacccagggggccattggcctggggagtggacgcagcaagcgaatgccgatcacccatactagcgccaacctgttccgtgggtgtagggtaactggtcgctggattctgggcagtcataggggaagcgtcgtacggagtctggacagacagcatctcagaatgtggtggtccgcgccagaaggacgagtgcgaggccggagaagggttggtaggtgagtccttcatgctcaccggcgagaagtgagaaaatggacttgcaggaatggaaaactttcctggaaaagtgcggtcgaatggagaatcatttcccgatgtacttgatccgggacaggaggagaaggggaagggcgatgacattgtgttgactgttggggcgccgaagtctgacaatgcgctgagagctttgtgaattgacggcagcgtttgtttattgctgtctggagactttgcaagacacgatccagaagatgattggatcaattttaatgatgggaggggaatttggggctctctttccggaggagttttgagatggggcaacacttgttggggtcgttgaaccgagccacttaatgattgaagtcgctctcttggtacaaactcatctttcaccttattatctggttgtataggcttgaatgggagcgatctcctccgggggggtttactcttatgtgaggccgagcccgagactggtcccggggctgccttgagttccggttttgattggccctcctttgcggacgaatttaacctctttgaatctctgggatcaaagtcaggcggctgtttatgattttttagattcccgggtaatggttccaatggagaaatccttgccgccgcggcaatctcagggtggtgcggagctagatactccatcagcactcggtcgccctcacgggttgagttctgaggtttcagctggttgggcttacgagaaccctctgcgtcggcttctttttcgctcgcggaaacaaatggtggtagtgtttcgctttctccatagttgggtttcatcgcccccccacgggnnnnnnnnnnnnnnnnnnnnnnnnnnnnnnnnnnnnnnnnnnnnnnnnnnnnnnnnnnnnnnnnnnnnnnnnnnnnnnnnnnnnnnnnnnnnnnnnnnnnnnnnnnnnnnnnnnnnnnnnnnnnnnnnnnnnnnnnnnnnnnnnnnnnnnnnnnnnnnnnnnnnnnnnnnnnnnnnnnnnnnnnnnnnnnnnnnnnnnnnnnnnnnnnnnnnnnnnnnnnnnnnnnnnnnnnnnnnnnnnnnnnnnnnnnnnnnnnnnnnnnnnnnnnnnnnnnnnnngcctcgccccgaggggaggggaccgattaaaagcatcatccgaatcatacatagcggatgtcataaagaaagtggcaggtgcatcgggcacctcgccttatacttggtgttggtctgactgattgaattgacgatcacacatcaataagtctgtaagatatggttagagaggggctgtaattgtgacttggtgatcggatgaatgagaagcacgagctaagtgcatacaatagaaaagcagaaaagcaagtaatgccgacaaagactgtccgtggttaaagtgttgagatgaggagatgaggggttgtcaggtcaggatgacccggagagaataaaacgaacaccagtcggaaaccaaagagacaagaaaatagggaaagtaggaaacgcaagaaaaacagaaaagaaaaaagaaacgagaccccgaagctctagactactcagtttcgaggtctgcagaaagtgcacttacccaagcggaaaggtggacgggtagtgaatgggtcccgggatgaggcttaaaagctccgattgtcactgcgccatctgcagatgaatatccctcggaaagaagcttgcaggttggaaactgtacaggaactcttgcaagggaagaaaggaaaactaagggagaagttgtaggcttcggggaaaaaaaagagaaacgagtctaagggtgagataataccacgttctacacgtgcaagttagggcccagcaatatctaccagtataatgccagtaatccgacggccaaaccagaaagaaagaaaaaaagcgtcaaccgagaaaaggagaatcaacgtccaaggaatattcgaggggggttgggagagaagacaataataatgcggctctcgctctcaactcggagctccacagaggaatagattacccgttacgttaccgtgactggtatttaccgggtttcgatttgattattcgggtattctatttcccgaggtttgtatttttgcgtctggtatttttctggtatttttcgagtatttccgtatttccatgatttcccttctcatctctcgatatcttcacttttcaacttcctctcggattccctgaatagtctccatccctcgatccggagcatttgaacttggtcgcacatacaacataagccaagggaaaaaaaggaaagaaatgatttctccaccgctactctctctattcaggctccaccagtaaacttggagacaacaaccggggtgcaactctcaagtcgtttcccctctatctctctccactcccaagtctgttatacccggctagggaacctgcacgaagaggggggcccacacggtctgttcacttttctcccatttcctatttcctctttcctctttcctctttccgtcccgccttttggtcctttttttacctttgcaacgtcagactcactgcgctggcacgctaacacctgggagcctcgagccgtcagcccgaaggatcttcaggctgtcccggttggattgtcaacgcgctgtctgcggtaaggagatcgtccagcccacgttgtttcagagcctcgttaagagacaatctttctatactactagtatagttcgatgatcccacatggtacattctacatggtgtataatacccctaactataatccacgtaactgtaatactacgctataccacctgcatacatagatgtgctgtccaaccccagtcggccacactccgaaacccctaattcccgaattcccttaattatcccagccgcatcccctcacactagtggattgtggataatcgagaatagattagttaatttgaaaccgatgcctatctgaatacctaaccctatcccaaacctgctattgaatcatgtttccttggaagtctaagaaaaaaataagaagtggagttcttcactccctcagcctcacttacacgtagagccgcagggcagataaaaaaagcctcacttttttcgctcctttgcatccaatcataatccattgaccacttgtctgcccgcagatgagctcaacggacattacacgatgcggtattccaccggtgtactttgcttctttcttttacgttacttgtacttctgtcttacaatcttttaatatacgtactttgtattttggtcttttctttttttacccgactcattacttgtatatctctaccgttttacggagtactcaatcccgctcggtagtgtgatcggatgagatggcgtacattaaacgtgatatcctcgcaggatattataccatacgttctcgaacgttggtccccatcgggataagtgcttacgtccacacgtcaggcgcgccaaaagtacttgactctagctgttctgggcttgtactccgtattcggtacataacctccatgcacacacccatagagtggggttttgattgtttcatggagagttggttctggaccagccttacattctaataagctgaagaatccgatttagattcagatcggctcatctcaacctacatgtagacggcgctagaatggaataagtgaagtccaggcctcgattctgagtatatacaatgccaaacctaaaaccatcaaaagcttccccgcaagtagtcaaatctctacagagtgtaagaagactacaattttccagcagaagccctcttcacaagctgaaccctctcccaagccccctcagcaaacggttttgccctcttcgcgtaatcactagccctcgcactactagcttgtctcccagcgaaccgggccgcaatgccctgcataatcacggatcctcggaacgcaaaaaatgcatcgccccacgccacgtccgagctcgtttcgtacccagacgtctcggcgtaccagccaatgcactcctcgcgccgtggcagccctggaacaacccccggcgcgaactgcgacagttggctgtccccaccgtcgattatgtaggggcttgtgaggttgcagaagtctgacagggggtgtcctacggtcgccatttcccaatctaggatgccgatcacgcgcggctccgtcttgtggaagatcatgttgtcaattttgtagtcgccatgcacgagggtgccccggtccagtggttgcgtgctcttttgcgagaagaacttcaccatgtcgtcgaagtgagggagttcaccgacgggttttttggtgtcggcatcgacgactgctgcttgtgctttggagatcgtcttaaaagtggcgatttggcggtcaaaaaagcctgtcggcttgccgaacgtttcgagtccgacgcttttagggactacgctgtggaactttgcgagcgtttgtactgcattcttccagctgcatgcttgttagtattgcgcagtcactgggggtttttggtgtcagcgttggagcctccatcgcgacgtacagtgctttcctctcctccccgcttatacctggcatcgctgggtcggtgaaatgccgcccgtctaggaattccatgatgtagaatgcggttccaatcacgctgtcatcttcgcacaggcagtacgccctgggaacaggtacatcggtatcccacaatgcccggataatcttatactcgcgctcaaccttatgagccgtctttgaaagcagcttgccaggaggcttcttgcgcagaacgacctgcctgccatcagcggcagtaagaaggtaggtaggattcgattgaccgaagccgaactatcgtgacaaaatattagttcgtccgtttgatattgctcatttggtgattgacggggccagactcacctgcttcacatcaagtggagtcttgacctctggaacatgttggtcaatgtacttctccaacgaggggatatctataggctggcgcacttctcccgcccttatgtcgatataaaatgnnnnnnnnnnnnnnnnnnnnnnnnnnnnnnnnnnnnnnnnnnnnnnnnnnnnnnnnnnnnnnnnnnnnnnnnnnnnnnnnnnnnnnnnnnnnnnnnnnnnnnnnnnnnnnnnnnnnnnnnnnnnnnnnnnnnnnnnnnnnnnnnnnnnnnnnnnnnnnnnnnnnnnnnnnnnnnnnnnnnnnnnnnnnnnnnnnnnnnnnnnnnnnnnnnnnnnnnnnnnnnnnnnnnnnnnnnnnnnnnnngatatctagaggctggcccccttctcccgccattatgtcgatataaaatgaggaaaggactgtgcgaaaagattgtggagaaagcgtatatatttggcaaggtgactgactgtttaaagagtaatatgtacagccaagccataaatgccggggcacctcctcggcgtgaccgggggacctcggccccagcatttcctcggcgtcaccgctcgaggggggagcggggagaaaaaacaaacagaacaaacactcggcgcgtcccagcggtgagacgcgcagaaaggcgtcgagcgtggagctcaccgcaatttttatcaagctaggggcgctttatcaattgcgttagccaactcactgcgggtccctgttatttttaccacagctctatccactcaattctcgatcttcgatcctctaaccattttgtgtctaccatgaccaaagagaccaccccgccacttcaagagaaatccctcccggcgcacaatccgccttccctgcctacctccccgctaccgaaacgatcaaagcccgacacaatgaccaccgctgctgtcacctcgatccagcagccgctgcccccgctgcttgttaagaagctcgttgagtctgcccaggctccaacacgcggctcggcttttgctgcggggtacgatatctacgctgcaaaggagactgtcatccccgctaagggcaagggcgccgttgacactggtattgctattgctgtacccgagggaacttgtatgtgacacctgtgatggggattgagattgagaaatttggcggagctctcagcttgttgaggctgagttgggttaagagtcatactaatgacgaatacagatggccgcattgctccccgtagcggccttgctgctaagcacttcattgacaccggtgctggtgtcattgatgccgactaccgcggtgaggtcaaggtgcttttgttcaaccactctgacgtcgacttcccagtcaaggcgggtgatcgcgttgcccagctggttctggagcgggtgagttccggctatcaatactgtatgttgtgaatgtgtctgacctgttttagatctacacccctgaagtgagcgttgtcgaggagctggaggagagtgttcgtggtgctggtggctttggtagcactggtatttaagggtcatacctcggtacataattggaaggacagacaaaattagataggttctaggtttgaaaagaacctagttacgattatatgcattttgagatcttgtttgactgaatgaacgaaagatacaaaaaaaagtccatgcttgattcaataatcaaatctatgtccacaccgaatttttgatatagagaggggccatcgacccggcttcatccaatgccctcccgaaatccttctatcatctagccatgccatatgcaaaagatataaaaccaaagactatcgcagctcctcgggaagatccgccttcttccaatcctgcaccttgaaaataatcttcggatcccgcaaaaaccgcgtattccgcacgagtctaacctcagcagccttagtcttgcgcaagtaatctctcttctccaattcctccgccgagacctctccttccagcgcaggcgcaggaaccgccagctccgcatcacgactctccagcgtccgctccaaaacactatgcatactcgacagaaccttgacagtcgcgctggccaacggcaaatccgtagccacgacatcgtcgggcgaaacccacgacttggtcgtgcgtagcccatccactgcagaaacggcctcgcttaggcgcgcgacggtcaacgccgcgaacatgtcgcccgtcccgctgaagaagcagttcagcgctggaatgtcgacacggaatagtcgcggggacccatcggagcgcgtggttgagccaattactgttaggaagttctctggcggggatggggttgagcctgattgggagagcttgaagagctgcactgaggtgactatcacgtgtggaacggagtagatcctgtgaatggctgtcaccgctgaagcgagagtggctaatgaagttattttgatgccggagagagtcctgtattatttttatattagtggttatgtctgggtatgaagtctgggttgcttactcggcttcgaactggttgggcaaaatgagatccgcaaaggggatgattttcttgtatgcggggactacgtcgtcgttgacatatagccggccttggtcgcccatgactggatccaggactgacattatatcagcatctgtacttgggaggaatggagagtctttactgaccccagaaaaatgacccgggcttcttctccgccttcttttgcaggtcaatgccgatagcgcctactgtttccacggctgctgcactcggggcgtagcccgatagcatgacatcgaagtctgtgaggttactctggcataggccctggtagagatctgaaatttcctgcgcggtggcacgagttcccttaaattggcggtagcctgtgtggttacctgcaattgcatgtgagtctgggttgagtgttcactgttaagaccgggttgcaacgtactgaagtggacggtgtttatggcggctacttcgcagcccagagattgcatgacgaaggttgccattgtgtttccaacatggctagagaagatgttagttgcttcactccaaggatgtcttctagatataatgatctgcgttatcggactcgaaacttacccataaactacctgattgagtgtcagttttatcacccgagggactgggcagtttcacttacatggctggcaacagccagaaccctggtctctggtactaatgaatccatgataagtctaagatcaagcagttgaattgaaagagagagtctatcaagtatgttcaatgttgctatgactctgtgtggggttcggggggggaaatgatttgccgaaattcctcttacctaattggccccaagaaccgagtttgttatcagtaaagaaataattccatgttcaattggagttagtgctaattgaatgtagtatactccgtagacatagatgtagaactgtagaatcaatcaagttaaaatctttcaatatttggaatgtgagaaccttacaggatctgatctccttccgtcaatagagaattagaaaagacaaacggtgtctgtcatttaggaagtgtggttcgggtatttaaagatatctcattgagaatagagaaatgttaccctgcactactcagcaggagcataattgaagaaccaaacagtgagaaaatgtagctgctctactgcttacgtaccgatggcaactgcatctcatctcacattgcaccgatgtctccgtatacttctcctaataaaaggccttaggctttccagaaggacgtaggggctctgctgagcgtctttgcggctcaaatagtgagactgtagcagtcgctgggttcgtactaagtatttctagacaacataggcagaatttgaaaaatggtaggccaactgaatagcctcgatttttttcacttagggatttcatttagaggagatcgagaccgttagtatgaatcgtcatgttaacgacgctagtcctttttgataggacgatgggcgatctgaatggttaactaactagttatccggttagttaacgtgtctattgagcgggaagagctgactcaacatctgttacactttcgctagtaaaataccttcatacctacatacatatataagtactatgtaggtactctgtggaccggataaggaatgtcaaacctcgtctatacctgaaaggcggtcagtgaggcagtgcgaagaaacggagatatctaaatccggcccgtctcgacctcgtatacatctcataaccacaaattcgcgccatgcaagccttaaggaaagccttctgatttatacttgcttcgcttcgcttcgcaataatcgtctgaatttctgtctcggcccccttgcacaatttatagttagttatggggccaggattacataaactaattacgaaacacatgagattaattgatcctccggtatgccggtccatatgctccgacatatgacgatcccaggttttcccactgcactagttatattgcaaccactcgcatccctgggcctttcatgaacaattgtctatccaagaagcactcgaccagagcttcctctccaccatcacaattacaggatttaatagcagccctgatgccaccatgtgtagctatcacatgacccggctgcccctcatagctagaaatacagcacattctctttccctcagctactaactacgtaagtataacacctggagtgctttgtgagtgcccactaagcgttaattagcgggacctcgggatccctatgtgatagctctacgaaaatttacttactccgtagagcctgactctgagcttataaaagggcagctaaggtaatagggaagcgccactagggaaataagtgaggtaatagatctactctataactaactgactataacgacacatacatactcaacttttactcaatatagcacagatatgatcccctgaagccaactgagttcaatcgaacggtctaggtcgtgctagtggtactccggagttctgttagcgcattggcaagttctcgtccaatccgaaggccttggaactaaaaaaggcccattttaggcttttctgcaacttccagggttaacggcgacttgcgcttctcaacttcaacttcaccaactcatcttcaagatcgtccagggacttttccctcagtcactccttctgaagaaccgattatcgtcattcattcccgaaacataatgttggattaaacacttctttgtttcccaactgtcattaacatacaaagactgtcctttctcctaataattcatacttgactatttatgtcctcgcctcgatttcaagtcgacgacaatacgtcaaaatgtccggtctttaccatatctacaacctcctaatcctaattactattctctgtctatcacccacatgggcccaatcagtggagcccaccgacctgaccgtgccacgatccgcctggcacgcaagtggagagatcacagaccgtcgatcactacaagaacccgcagaggaaaccacaacagtgcgccgacgaacaatcataacagcatcaaattccacttcgacaggaatgcccaagccgttcgacacactctcctacaacttcgccaacgcaaccacctgcatcgacttcttcgcgaaatggcgtgccaacacgacaatctccaattgcaacgccatctccctcctcatcgagaactcaaatgccttcttccacacccttaattcagcctccgccacctcccgcatcctggaaacctcctgctcggcaaatgtctccaagtgcgcatccatcatgaccgctctcgcggccgatctactcaaacccgccaactgcggtgacgactatgataacgataactccgtcgtcaagggcacgtatcgcgacctcgtcgcatacgaaccaatataccgcaccacctgtcttacaaacccatcgacccagaactactgcttcgtcgacgcagtgtcgaattcaaaaaacccagatgactacaacgtgtaccttatgccgctgggtacccctctcactgtcggggatgtgccaacttgtaataagtgcttgaaaacaactatggatgtcttttcgaaatgggcgagacgggacggccagtctcttgattcgacctatctcccctcggcgaagattatcaatgcacactgtggtgatggctttgcattaactaatatcactgtgggctcggtggatgtcagggctggggcggctcttactgctcccttgcccaatcttggaattgccactctcgtggctttagttcttggtgtcatggcaggcctgttttgatctaaaatatttatgccggtttttcttgtccatatctacacttttttttcttgtttatcttttggggtccgtctgcccgggtgggtatggccatggttgatgtcagcgagcgtgctttttgctttctgatttgaccgtctgatttgtacgtaatttctagtgatattgtccatattgctctcactctgttattttcttattctttccgtatacgatagggttgaatcgatttaacatttgcagttcgctaatgccaaaaatgtccgggtgaataatatattcctcaaacgccagtggcaagcatgtccacaaccacgtataaatagacacaatataaacaaaaaaaaaatcgcatctgacatcattggttcgagtgcacatagttcgtgatgtaagaaaaatctggcaaaggtagccaacaaaacaacaaagcaaaaacgctcactgacataagaatgttattttaaaaaaccaacacgaacctcatcagcttctcctcttcaaccctcctcccatagcaacaccaacaaggctctgcggctcacctccaaagctagcccctagactcataggaaccggcgatccgccaccagaaataggactctgtgtagcggcatctcgttcccgcttgacacgtataaagcccagtttggcgaagcggccaacatgcgtccaaaagtgacgcccggctgggtgtgcggcgatgcgctcgagaagatcggctgtcgcttcgcggacaacctggtccggatggaacagacccatgctgacatagaagagaccggcctggttttccggtgcgatggttaggagctggcagataccagcgtagtccttgacggattgggagagggcgaggtagatggaggcggcttcagagtgggagagttttagagtgcgaagacggtcgtggtggtgatggatgtctgggcgttggattgggcgcgcggggaagtacattgctgcgatatcttggatgtaggagtagtaggagcgagtgttgcgccagccttcgattcgggagacggaggctgagagctcgcgctgcttggcggcttcgtctctccatacatacccgtgcccgcggagagttgttgggtctgaggcgtcggtttgatggcctgtcgggctgtccggagagagttcttcgcctgggccgatgatgtagagatttgaggcgccgtagactgcttcttcgaaggctgcggcgacgcggacgaattttgttatgtaggctcgccattttgcgcggacggcattctcgccgtggcgttggctgatgctgcggaggatatcttctatgaataatgtgtcgcccgttgggtcttgggttgtgtgggatgaactgctaggtagaagggaattctgctgctggaagaatagaagcccttccgttaccggtgcaggttcaacgtgactcgagatcttgatgcgacccgtggggaggtcgcacataacgtcccaccattcaggatggttggcaaaagtagggtttgtgacacctgcaataaaaccaggtaccttgaggagatcgtcgatcttggaaagatcagtataagggaatgcgtgtcgagtatacccacgtagaatgccaccggacgcaagagcgcaggccgccagaaccgcctctgcaacttctcccgatggccggttatgtcctagaaatacgacacgcttctgagtgagaatggcgttgacaagaacaatcacggggtgtgtgaatggcccgctcgttgtcaaatggggatgcgctgggaaagcctgcggggaattggcatgcggcacagcgaacgtttgaatgagcttgatgagggaaaagtctccaacagtctccggccaaatcactgtcggaattttgactgggatgggtatgtcattgtagactactttcgactcgtactcatgtgtatcccgcggtaggacatatcggctcactttcttcggtgacggtggacattccccatcccggagttcttcttcttctcgctggcggatcatttgttcgaatttctccaggaacatatcctttgagttgctagattgcaagatatgacgctcaagaatcgacattttcggcattaacgaaaggtccatggcattaacagcgtcatagagggatgccagagtctcggggaacggagatttgaagtagtcctccagcgctaggagtagtaaaggctgtataatggttagggtcaggcgggtgctagtgccaggagtagcttactttgtaaatgtggaggaacgaatgtcgcgtacagattgccattgccttgactacggcgcctctgttcgctattaatactcgtacattgagacaagacagtacgagtaggtacaacttaccttcggacggtattatcctgctttgtattgacaagattcagcacatacatcaagggtggcccttcaccaccctcatcatcgctgctgtcggggtcatcggagatctcgtccaggttctcgtcctgaatatcggctccctcgtggcttccatgatattgtgatttccgttttttcttcttctttgcacccgacgaatccgtttcttcgtcgccattactgtctttgtgtaagaagaacatggtccagtcttgactccgcacatgcgtctgatccggcagcatcagctctgcaagcatgctttcatccccactgattgcagcgggatactgatgctccatgatcggcccccgatcaatatggaaggatgcaactaggatgtattccacatggcgctccggcgagtcgagtgggtactgcgctttgcagcggcgtggcctgaagcttgaggccgcattccctgtggatgttctccgaaaagaaccgtgcgagctgctgggcgagcgtccgataaaggagaccgcaggcgagagccgaggaacaccacttgtttggcggttattcgaggcggagagggagtcgttcgacggtcgatatggtattgttgttgccatcttctgggggtgttgtggatagaggattactccgggctaagctataaatcgaatagcatacctgggggcacagaaagcaccagatcaacggccaatgataataatagttgaattaattgtctcgaattagctgttcaggggttaagaggggttaagaaaaaggacggtctctccacagtggagagacgataagagcgataagggggggatccataacattcaaaggttgaacatcgaggaagatgatctatcagaatgcaatctgtcttttctttttggaccgtacattgtagatctttctatttatattacagcaaaattgaggcatcatatattgcatttttatggagtatgaagtaaaaaatctgcgaacaaaacaaaacactgtccacttctaggcattttacctgatatagaatagaaaggcaacattgtgctacagaacacttggatgtaccttataggtatacccaaagaacagttaattatatgaattaccttccatttatcttactttctatatttagacccttggaagccaattgatggttgatgtaacgagtacgattccttatagatctaactataaacacttcaaagttacataactatacaacacctagtcagccagatcctgtttctttcttttttccttcaaaatatagaacttatattatactctccttagcaaggtgaaattacaagcattaaagccagacaaggatcgtacaatatacaatagagggtcaaaagtgtgttcatatagatagggcggtgagaaagacggtggcaaaattatgttgttgtgccgggactttgtttacatcgataagcaagccttcgtcataggctgtttacaattcatatttcagctcacacgcgaattttaccatggtaactaaggatcctgagggatgatataactattaaaaactaatcaacaatgacccaggccaacaatcccacattcaaaccatcgccgttatcctttgggtcgccgagggcatccccgttccggcgcccatccactccaaattccccgccttcggccagtcgcacaggaggcaccccggggagctctcccagtcgggcatatacacctatggtatctcctagcaagctcaatcaatcatatacagtggaggatggtgaatcgcgttctccgaagaacgagcggcccattccccagccgaattttgccagagagttctctccttccccaacgaaaggaggaaagtcgccaggcagcttatccccaatccatgggtcaaggacgggtggagttgcaagcccagctggcgacgcggctgggaagctgccagcgcaacaagtgagggagatcagagaagctttccaggttctcgatagggataacgacgggcttgtggacaaagatgatgtgattgatgtgctgacaactttgggtaggagaaaatctacctatattttttggaaattcggacgagggactaatccgagtatctgaacaggccaagactcgtcatcctctacgctctcgcgcttctttccaccaggagcaggcaatactatgaattttccaaccttcttgaataccctttctgggctcatggcatcgatgtcaccttcacaagagcttctcaacgctcttgctgcgtttgatgatgatgacagcgggcaaatcgatgccacggaattacgtgatgctctcctacatacctccccagaagatggagaggaaagattgactgagagacagatcgatgaagtcttcagtgggtttatagggcgcccagcatttattggtcggggagcgaagtcaggcgggatgggtaagaggggtgaggttttccagtatcacgacttcgtgcgcagcatcatgggtggggataatggaaatagtgccaagaatgaaggagatgcacatgtatgaactgctattatgaaatatgggtttcaattgagttggcgttacggggtcgcgtcttataatgttggcagtttgcagattccaagtctgtagaagcaggggtcagactatacaaagcttgtcaagaatgattatgtaccattacttgttcaattaccaatgattttcggtaactaaaagcagtgaattaagtaaatagaagtatacgaagccaacgccttccgcatcggcagaaaaacatccagccaccgcgatcagatacactccacctcgtcaactgcactcatcttaccccgtttcctaggatgtccgctcgtgaacatcaaatgcagacttgaattcagaaaaatggccaaacctcagcccccctgggctcttggcatcccgggccccgacgcacccccatcgccgcgaaccatgcgaaccctccgaaagatccaatctcaccaagtgctgtcaacatctagcgcgctcattgcccagacccaggcgtctcaacaaactggctcccatgaatctcaacctggatcaacagcaactcctggtgctgcgacccgagcgcgcgcacatcgccgagctcgatcaaatagcgacgcggcttctcgtgaagctgcggcaacaccacctgcgactcagagacgacccccgcggaaaacagggtcgggaattggaataaagcgatcgcttctagagagctttttgcgcgatggaccgcagagttcaaatcccaacgagggactgagagagctcaaatacctcgtcctatccagcagagtggatgctgacggagatggcatggtgaggggtacagtctgctttgcaaaattaatgtctaacacttcgcaataatagtcgccgtaccggatctacctctggttggtcctcctcgacattcctcctatgcccaccgatgaataccttgatcttatccaccgcgggcgttctcccgcttacgccaaaattcgcaatgatactttccgcacactagccacagaccctctcttcaaacgccgagtgacggaggcaagcttgattcgactcctcaacgccgtggcatggaaactccacgattccaggccgaaacctcggtctcgaccgacgtcatctcggcgccgtgagatggagcttctagtgaatgcaccccctagtattgcagaagagtctccctttgggggagagttggagaagatcactaatagtactacaagtgattcagccatgtacgtccaaggcatgaatgtcttgtgtgcgccgttcctctatgctgcccgtagcgaggtggaagcattcgctctgttccattacttcgtcacacgtgaatgtccaggctatgtccgtagcgctatggatggagtccacaagggccttcgtttggtcgaccgatgtcttgagattgtggagccgaagcttgcagcatatctgttctccaaggggatgcacgccgaactgtacgcattcccatcagtattgaccctctgcgcttgcacgcctccattgccagaggtgttacatctttgggatttcttattcgcatatggggcacacctgaacattctgtgcattgtcgcccagctaatccgtatgcgagacctaattttggagagtccgaggtaagtcgaaggctgtcctttgaatgtatctgaccatagctgacttgaggatagcccaaacaaaatcctccgctcattccctcccctcaatgcaaaggagatcattgcgttgacggttctccttgtccgtaagatcccagaaaacctttatgcagagatgattagccatgcaaaatagacatggctagacctaattgagagagcccgaggtaaattccagcctgatgaggagctctgaccgaaagaaagattttactacctggggtttgttttcggatcggcgtttttgatatgattgaccgcaacgattgcgtctggtgactggatgggatgagacttacattaacgaacaccaaagataacacgcttgcttgaatgaactaatgattgtaccagtatttgctagtttttgagaatccatttgagatgagacatgattctcccttttagaattcagatgttttactcttatggaccatgcttccctgttcgtttgtcaaaggatgaaaccctacttttcctcagttctcttgagacataacaaacattgtttgccacaagacaagaagagatgattgcgaaagcagcaagacatcttcattaacgcaatctgcatgatttaggcgcctttcatcgtctgcgctataagtactaagtaccctttacttgacccctctttcttcgccccatcattacccagagaaatcaatgtcgtccgttctaataacatctatcgtcctggccgtatgccttgtcctgattctgatatggagcaacaggcgcgaaaccaatttcgcatcgaatgacccagcgatatgccgcagaatcattgccggcgtgttgaaacacaaagaccaaccgaataacctatcaccacaccaagcgaaagcaatttccaacaaacatctcccagtcgccttcggaatcgacaacgccttcacccgaacagagcgtgcgcatgccgacatgttcgtcgagaaagtgaaacggctgatcaatatatcgacggagcagtggtacggcgtatccgagttcgctagagtcactaccagccactggatcgagcatggcttccccgggatgaatcatagctgcggcaacagcggtcacaaaggaaagaatgatgtgaagttcaccaccggccgtaatcggatcaacgtcgccagtctagcacaaatactttcattgaaagttgtgctatggctgatgttcgacaaaaagactcaagacgaaacaggccacgagaatctactgaacctagcggagtccatcaatcgagtttggatatcttccaagctgaaagccacggagaacgatattcccagatacgaagacgacgtgttgcttcaaacgtcgctggtcaatatcttcgggcaacacgatcgcccagaagacaacccattgaatctcatcctgccttcatttgagacgatgtggcgcatcgtcttgcgaggattcctagagaccagattcgcgtctggaaaagaagaacctttgtggcgggagacaatgattgcatttgccatgaatcccacaaaatcccaattcgacgggcccccgtccactcgtcccaagtctgaatctagggttaatcccagcataggcgatacacatgctattcaaagttcaccctgcgcaaaacacatagttcgggaatcgcttcggctgtatgtgcccacgagacacatacatcgagcatatcagtggcaaccgggtatggggacttctcatgaaatcaggtccgctgatatcgaggggtgtcatctgaggtccgatatctggggttctgatgcagagcgatttaacccagatcggtggtcgtttctgacgccggcgcagggagacgcttttatgccttttggatctgcgccctttgaatgtcctgccaagccgactttcgggccaaggatggtcggggtcttggttggttctttgttggcggctttggaggataaggagcatccgaggacttggattttggattgtgaagatgggaaggtgttggagcacgtcacttctgggaagaggttgtgtccgcataggaattcctatacggatttatatctagtgcggtctacggaatagagaatagtgaacagtgaacagagatatctatggaatatctttcgaacacatatccttatgtataagtaaagcaagcggatgtatgggaggtcggagctgggatttatagtcaaaaaaatgtaaacgcctaggaatcacagaataatttacgtcaccaagaaagaccactaccaacagccaataaagcacagcacgaacgaaacttatgtatgttgatatcgaccacacccgcctcgaatattacatagctctatcacgtaggcgcagatattggtgaaatctcaaccgactttttcaacccagacccatctatcaccagaggcttagaaacaccaacagcattggcttctgcggtcatctcatcagcccatgactgacacatatccctattgccaggtaccgaggctgtggtgtctgagccagcaacacctaacattccgtcgacttttacggcccgcgtgagacgagagccacgatcaagcttcaccctgatccgtgacccaaagaaactcaaattgttgaacatggtcacagcgcactgggcttcgtctgctgttcgcatggtaaccaagccgcggagccggccattgaagtcggccgagtccatggtgattattctgcatttctggacagcaccggctgcttgaagaaggattttcagatcggtgcaagtagtagccggattcaagttctcgattatgatggctcgtcggtctgaatagatgaatggagagccaaggtttgtgcctttggcgcgtgattcgcgatggtggtagttctggtggttctgtgattgattgtcgctctggtggtgcatgtgttgtggaggcgacatctgataacctggcatcatgttccaatatggctcgtacattgggccgttcattactggggatggggggaaacactgcatcggtggtgcgtgtgaatctggcatcatagtcatgaatccttggggtggcattggtatgggtaccatcatgacgccatactctgagtatgagtatggtggagtggcggggtgcgaggatctggggaggaagattagctttcatattttatacttgaggatatagactcactctggcgagacgggtgaagggggcattgccatgtttccatgtactgatggaggtgtggagtggccagagatatagcccgtggacatcattgctggacttctggtaggcccggcaatgggcttggtgggcgtactggtccgcgaaagtgtgacgaccaggctctgaccctcccatccgctggtcgaaagtcgatctgtgttgttgttagggcggatcattggggattgcgggatagacacgtacggtacgttcgccaggcctcgtcttcattcttgacgatgatctggccgagtccggtggggaatccatggctatcatcgtatactactgcctggcgaatatgcaatgcagtttggcggacgagatctttgagttcttgccagcggcaatgaggtggaatctggaattcttgtcagtacttgaacgcatttgacatagatatcaaactcacgccttgaaggaatacgacaaactcatcatccgacctgcgcgatctgggatggtatttatcacgaccgagaagaggcatggctgcagatactccgagacaacacaccccggtatttcagtgccgaaagcgtactagctcagacgtacggattgaaatggcggatagaattcggtccgtcggtgttgcgaaatagtcgaggctcgacttgtccgaccaggtgtttggttgagtatagaacttggacaattgggctttctgtcagagggctatgttagcttagggtatataaatatgatacccgggacgactacaggaacgacatcacaaagcatcaaggtgtaaccagggtgcaatacctgggaacaaatggcacacacctgccttttttttttctcttcctgtcggataaatgcaagtcaacgtattggtctgaccgacaactgcagggaaaagagataaacccctccacgagctggacgaaggtcgagcagattataaagccctggaacaaaaaggaagagaagtcgatgtttcacaagaacagttaggatgatatatgatagattcaattaaattcttactagtattaatctacgatagtctcatgagcttacaagtagaaatcacgggggacccagaatactgcacaatctggacgaatggcgacaccagtcgatcagcagtagccagtcatatcagagaacaagcagttccctttctctttccaactgagatctgtcattttcaccatgagttcagctctgccaaatattagaatacaatagagtggctctgccgtcccacctcccgggtatagtcccacttagtcaaggcctatcaggggccctaacatgtaatatgccccctctttctttgctatccatatttaaataatcatctcgatcacgtaccggggtatatccacagaggcaaatcactccgtaagctgtgcttacttgacttagggaggatgtagtgttacaccgctagatccggatcggacatgcggagtggccatgctagtggacatgcatagtggacctgtattcatcacattggcttctgtgtctaatgtcagatcggaaaccctggaaaaaaagcaaaaacagcaaaggatgggcaggaatgaaagaaaaaagaaatggttttatgaaagggagatcagtcatatcttgcagatattggtttttctttttttggatcaattacattgactattgatttataggcgtagctcgctaagtacctgcagataaaatatagatggaattattgaaggataactccggctcaaattattgccctaaattctcatgtggacagacaccgccgcaagtcgtcgtcgggtattgaatatgtactcgtccttaggatatggagaaccaagtgtcttacagatcttcagatagatctctgtgttccctttgaccaaggccgataactacaatagacatgccgcaggacatgtgcgactgttaaaagtatatcaagacaaatgaccatccgcacagctacggacatcctaagtatttgtactatgacgatacgccaccaaggcactgggctccaggggagatcacatggccatggtctctacacatatctacggcctcttttattgatggattgtggcagagaatcttctttggattatgttcagttcttatgttaattaaattatccttccacgggcgggtgattccctgctaaatgcagatgattacactctattacggacatgattagcctgcaaatggtactatttatataacaagcctatgtataggcaagggatcgtgtttagttatgtttcaattcaaatagaaggataaagtaaattaatctaattcgatgttggaaaatgtgatatcagacagtgtcgctcgaaacagataatgagatagggacccagtgggcgatcgctgaagggcaaaataaaccaagacatgagaccggctccatgccgtacaataacctgctgcaatatgcataaaaagggaaaatgtaaacagcattgccgtttataaaagttggtgaacctgcaagagaacgcatgcctgacaaatcaaagcacaagaatccacatgcaaatagtatgttgtggtcaatgccgaccgagtggaatgaaccaaattcgatgatatcccaagcgcacctcggtccaaagccccgtggttcttgcgccgataatccctgatccacaggctgccatttccggtgtccaacctgtacaatcctccataggcctcataattcgtaaatcgtgatcaacgaagatcaggtagtgccagcacagcccgggcgaggtcggaaacgaaggaaagcatcgaagaaacgggatagaacgttatttcattcggaaaggaagtcgcatctgtcctcgcgacgggggagggattttggtttgcaagtcggcttttgatgttgatccaatcatcgcttgactccccggatcgtccggtttatttggtcctcgtttgggtttattgtgggtgtgtatatcgtgctcatctcatcctccgaagccgaccttggctgcgcagcggctgcagtagtaagagttcatgccgaactgaacaacgctgcggcctgattggcctaggctgagagattgttggcagcgagaacatcggacaatgtcgagagtctggggagaagtggcctccgatgggcgagcaacgccggcggtctgaggttgaggagtaatttgcactggagagctcattttgaggagattttgaactcgagtgaggatttgaaagagagaagggcgctggaaattgttttgcgttgacgcagttaagaggttgagccccgtgatttcttggtttacttcggttttctttaagtgatgatgatttgacttggtaaacaggaaaggtgtagaaatatgaaacagggaaagatcacaggcttttaaattgttttcaagccacgaaagactccgtattcccccttctcttgccgatcatacatgtgggctgacatatgggctgcttttaggctcttgttccaataactcggcgctgacgaggccattattccgataactctgttacctacgcccatcggccatggcgataacacacatctccggcataatacgatccttgatcactggcctattggaaaactaaaaagttgaaacaacgtcgtgggaggcactatatttgatacaaaattgatcatctccactttcatccaaaacagaactaaatcagaaggaatatttttagagtcatgtacatttacgtaggtgggcgtctcaatatctcgacttgcaatataaatacaatctaccgacttggacgtatttctattatttcttttaagttctgaagatcctgaggtcattgtcattgtcattggggctaatacccttggaatactgcagctaagccagtttaggccatgaagccagagagaaagtcgaataaggtgtggcaaaccgaagggaaacggatctccaaatgaattcattggacgattcattggccaattcgttgggaaccttggaattggaacatcccactttggccgaagtccatggatttccacgaatagcacccgtggcgcatcagattcgcgagcgacgtcatattacctggattcggcaacctctcctcttctctccacctaacgtgctacgttgcagattgtcgagtcttcaattccccccccatcttcgagcctaggccaacgccaaaaaccgtttagattcggcccttgccccgcaaaaaaccgaaatatttcctgcccctcattcttgtcccacccacgtatcaccatggccaccggacaccccaaccttcacagctttcccaacagcgatgagctagctgcgcaattgcgaggctatgtcctccgctgccagaactccgctttttcccgacatggcactttccgcctcgccgtctccggtggctccctgcctgccattctagctaaagctctcctcgccccgagcaatggctccccggaagatactccccaattctccaaatggcatatcttcttcgccgacgagcgcgctgtaccgctcgatgatgaggaaagcaactatcgcctgctgaaagacgagctcgtctccaagatccccgccaagttcggctcacctgtcgtccacgccatcgacgaaaagcacattggggatgacgatccccaggaactcgcagatctctaccaagaagacctgatgcgcgagtttgcctccaaggaaactgtcaaattgcccgccttcgatctcatccttctgggctgcggtcccgatggccacacctgctcgctcttccctggccacgccttgctccgcgagaaggatgcttgggttgctgctgagacagactcccccaagcccccgcctaagcgcatcaccctcactctgcctgttgttacccacgctctcaatattgcctttgtcgcgacgggtgcgggcaagaagggaatcctgaagaagatctttgatcttgaggagggctctagtctgccttccactctggtcaaccagggcgctggtgaaaaggtgacctggttcacggatcacccggcagtggatggtgtttcattccctcgtcgtgggagtctttaaggtgtgagatgtcctagatggatttgagaggtatggatatggtggtggcttctttcctatttcgtaactctggatatgccttgcatggcattgaatccgctggctgtgatgaaaagtgattgctaggattaatagaccaaactcatatcttaatctgtcatttttgtccatacattataccgcacagtagcgatttcttctagaagtatgtccaacatcggaaggtcctattgtttgtctgcttatcctttcaggtctttctagctggaatactgcaaacaaacggcctcaataagtccggagacaacaaatataaccaactgacagttttgtaagacattgttggcattttagggcgagggagatattagaaccggtagcggagttcaacccactttcaaggagcagatagctaagtccatgatctttctcccctttggttcgatgaccagatgtaacagagatattatctcgtaacaagatagaaggttacatttatttttgaattgctcacaattcgcaatgagagatatatcacgccggtgctattcctaaacctgacactgctatttagaaggcaactatacaggaaactagatatatggtcattttaccaaatactcgtacgctattcagccaaagagtggtgtcgagaattcttgattagaagatcctttattgattgatgtaagatatttgcagatcaatcaaatgtggtcatatggagctgaaccccttgcattatgctgattctccaaccgcaagcatacccgaaaattcgttgagatttgccaaattcaggctctgtacagcgtatcacctcaaatgaaacgggttgcctaagaaggcctatctagaaaggggccaaaaatgttcttgttgtccatgctatttgctagcatattgccttacctttgaataagcccctaaagcagatacgagacaattcattgagagatacatacccaatctagtaacgtatcttaatgtcttattctgccatagatacggaggacaatgtactttgacagtgagtgcccaagccacgcagcccgtgccgatctcccgtttctagccggccccccacaaatgcatgtaaccccggatttccttacgggatatagagtacagcttagtctatggcctctttaacggtttgggcagttattagcctaaactagttggtatgataaatgcgttttggatatggagcatctagaccataggtgtgacgcctatcacttgaccgctaggtacaacaaacagctaaatgccggtcaagtaacccacaaacatgaaacgacccaactaataatagtcccctactctcatatatgcccacagagaaagctcaattggtcaatacgtaatcggccgagactcgtggacccctggggctgtcttggctgtcgatgctgcattgccctcttttctctgtgacattgtgctggccggccctagctgtttttgcatttctccaaacaaccctggtcactctgttacaattaagaggtattagcgagaaatcaaagttatacgagggagaagaactcactccaccatcaatcttgcagagtgtgaagcagttgttggaccgggaagaaagtgccactcctttgccggcttcgataggtgaggcaagggctagaccaaggacagtcgcaaaggcccaaataaagaaacgcatattgaaggtgttggcgggataggttgttggatttgtggtgggaacttttgaggatttgataaagtgatcattgtttctcaaggtacactggagcctcccttttatattatcctttctattgtatactacgtgatattagatactcaattcatcccccttgactgctgtggggttccgctcccacgactcgtgcgggcttatgtgcatgatctccaacatgcagggaggatcctcgaatgctcactcatattccaaaatgccaagatcgatctacatggagattgtgctgtttgagtaaagacctacaacttccttttcagctcgatggctatacggtgtcggctgatccaattcctgcaatgtaacctcaaattgcgaaccagcaaggcatggttctggtacattaggcgtccaactataaagatctgcagcctatcgcagctattaggaaaatagtcaagataacatcggtcccatataaagcccgatgcccacgcgagttatgaaactaattcgtcagaagtgcacccatattcactacaaacctcacaaagaacctcaaaaaatctttacaaatcaatccctcaaacatgaagctgtttattgtactttttgcacttgctgcctacgcaatggccgaggccggtccgaacctggaggcgagagctgggtgctcccagaagggacaatattgcaacgacggcacattcctgtgctgcccgggacaagggagctgtagtggaggtgtagtaagtttgcagcagctctctctctagagacagatatggtcaaacatgatatcagatggctaaaatgagtcatagtgcaaatgagcaacgatatacctaccaagggagcgcagaggtagctttatggttacgggatccatatatcgagattgttaggactgtctctttggtcaaagttcggggtactccaggcagtgtgttcctatgttgccgattctaaacggccgtggataaagctttccatccgcaataaaagccaataatccaatgaggatttattgcaccttgctccaagtccctgcttcataaagtcagcccgagttcgcaacttaattagtaagatggctcatacccctctagctcgatattagtggagcgtagatccccgtggacaataaatagtcagccggcctctgtccttgacattatagccttcgattgcaaatgttttcccagccgttaatacgtacaacccattgtttagcactcatgataatatctcacacatgctcacgcatagcaacccattcgctaacatcatgagcagctatgcccttaacctaccttatattagctataacatctgttcgctcgagggccatcatgtcagatgttgctccacagacttcatttgacactatatcttgtgttaaggtagagaagaacactatcattgccggaacccaggactggtatcatttgtgtgtgagatctcaccaagaacaacaacaaccatgcctcattgatccttaacggacacacaggtgcggtgttgtgcctcaagttgcacggcaactaccttgtctctggtggtcatgatggggtggctcgtgtctggaagatcgaaaccggccaatgcaaggatgtactccgaagccacgagagaatgcgcatgcaattgtcactgctagcacatataggacccacagcgcaaaatcagagatcagggggtggctgcgaaacattgaagaatttgcaggtattttaggaactacgatagtcaatgcaagttcaagtacattgactccgaattgctggaccacctccatatggtgcgagatgacttggtggatatgttgcgaagtggaatgggttgtgctcgacggcaaagacggcaatggcgtcattgctctggctaccatgcctacctgaccatctcgcacatgcaatctcgcattcgacagtaattgatatttctcccatctcacataactgccgttaggtgccctctatttcaatatataacgatgtgattaggaagtgacgggaaagtgactgctagctgaacgtcgacaaaggtagcctaaaagaggtatactcgtcgggcatagagatgtgggttttattcttttcaacatatccaaacaaaatccgagatcactgtattttctttttttttttttcaaacacttccccatgtgttgtgactgccggaggatatgttataatctcatctggtgacaagctgatatgcactggtggagtgtaggttaagaataaaagagtgggttaccatagggaagatcgcacacatcacctccccaactctccgttcacaacaaaacactcatttcatgaacccaatgcattatgccgattctcatttaatgacctaatacgaccatgcctatcccaacacgttcattttcgctgcgtgatccccgtaaacaagtcagtcccccggttgtttatcccttgaagctccccacaactgtcgcatccctcactgtgccactattgccatgccaacaactacagaaagaaaccatgctaattactaaagacttcaagtatagcacgacctgccacaaaaacccccactccactacccggcaccgctagcccgagcaaggactctgctcgagagacgaatagcaagaaccgctcgccatcaaatccctcgccggtcgagggtgttgctttgaaagacaatggacccactgctcgaggaaaaaccctacttcctcagcgcagtaatcttgccctagacaatggtcgtggcacgggacatgggcgcattcagccacctagcatcaagccgaaaccacgcgggcacccgtcaccaattagacagccagagatatcgccagctaggaaacaaacacaggcagattccacagcaataaagattggggtagcgcccagccgtcgtcaaagcatcatgcgacctggtgccttgaaggtgcctttagcgaagatcacggtcgcttcgtcaaagagctcggcacaatcattcgcgccgccctcaccccgcaaagctccaggaaggccattaccagttcagcctcatacgatcagaagcccctcttcacccaagaaaacagagacgctacctccaccacgtcccacacggtccctctctttacggcaacctgtcagcgctagcaagggaccacccacagctgccaaaacacatgtccggcacaagagtcagctggcacagaatacaaaacaagccgaaacaaccccggtaatcggccaacgtgcacgagcacactcaacataccaacggccgtcgtccccaaaaaaatcgtccaaacctccaacgcctacccctggagccgaacctcagtctggaaatgtacttatcccttcgtcgtggccggatatcgcagcactacaaacagaacttcttcagctcagtcttttccattccaactcactacaaagccaagctgaatggaagtctgattccgagtcacgtctgcgcaaaaagtatgacagtgtcgctagccaatatcgattggtactagcaaatgaaacgcaacagcagtgtcacctgaatgcacaggccctacggctttggctttccaattgtcgcgaacatcgcggtccgcatgatttctccgagcaaatccaaattctatcacgggttctacaggatgtctcggacatgattgctggcagtcgaggtgcacagtactctcgggctgtaaaaaccttcgaagactggctcaaccaagcggagcttattcgtcataaacgtgggtcggggtgccttgatgtcggcgcctttattgatcccctggggcggagctggaaagaatcattgcatgctttaaatgtgaagttggaactctgcgtacgccaattacaagtacttgatatcccgggcttgggggaattggagcgtctagaacagtctgctcttgccagagtggccaggaatctggttgaattgatacagctgatgatgcaggagattcgtgccatgcaaacattggagacagaagtggtgcgttcagaaagagattatgtcggccttcttgcgacgcagctggtatgctctatgaaggaaacgagggctccccaagtcggcgcatggaggagctagtctgtggtttatgcatctttgcataaacatgtagttttttaccacctgtacaaacgtgcgcatattacgtcgaaatgaaaaggaatgacattacacgaagagtgacagtatttcgcccaaagtaccttgcgcccaatcatatgtagcttgcacacggtatctaggtaactagtacataatggagatgggaccctgcaacggggacagcaccgggacctacagccctacctgcgaaacaggcgtgagagagaagtcgtcaatagtggtattagtgtactagggaggagaacaccatggggtgactactaagaagagaaggtggttgatgtctgcgttgctatctctgcctcggggggcttttttagttatcacgtggcagcttagtcactctatactggagcccaacaaggtaaaccgatgagtcagccaccgtcatctccaccagggctctagatcttagagttatcgctcgtattcccctcatacttttatttctatctttctcactccatcgtcacttgtctctttctacaccgtacagatatctactggaatgatatgcttcatgcagggtgatgtaaccttgggaaagttatctctcagctctcttcttgacgtcatccacggcagcttccgttttgacagataaaagtcacccgcaaagagacggtatccacttgcttagtacctttcgagatgatcgccgatcgtacctagtgaagaacttcaactttctcccccatctaatccagtgatcatgaaagactcgctttacgatcgcctttggcgccgggaatgcggggaacagctgcggtatgctgggcttcggggaatttacggatctaaggaatggatcaatgatctcgacattgtgaacgaactcggtgggcatactggttgtgtcaatgccctcaggtatgtttatagcttctgcctaggcctaggtactcggtttcatcgactggccaacacctccgccatttctgatgcttgccatgctaacagtctcgcagttggtcaaagtcagggcgtcttttggcgtcgggctctgatgatagacacctcaatatctactcctaccaacccgactcgtccgatgccccattcgcgctcaacaccaccgttgccaccggtcataaagcaaatatcttctctgtcaagtttatgccacactcaaatgatgggactctggttacatgtgccggcgactcgcaggttcgcgtcttcgatatcggatattcaagtgggagtagaaatgatgctaccacctccgcatttgcggcctccactcagagccgaagcttcgatgagttcttcagtggcacgcggtacctgagtgacggcaataccaacgccagattgtatcgaagccacgccgatagcgttaagcgcatcgttaccgaatcctccccattcctcttcctcacttgctctgaggatggtgacgtccgccagtgggatctgaggctaccatctagtgcataccctccgccacgcggtggccaaggcttcatggcataccgacaagggttggaacatgatggctcgaatgttccaccgcctctcatatcttacagaccatacggtttggacctcaataccatctcctgctcgccaagtcagccgcattatattgccttgggtggtgcgcacctctactgctttttgcatgacagacgaatgcttggccagaagacctctgctagtgctgccagcctcaataatgacgaagagatgagcaaggcgacgcgatgcgtgcgaagattcgcaccgggtggcaagcacaatttgaaatttgatgatggacatatcactgcttgtaaaatcagtgatgcgaaccccaatgagatggttgttagctggtctggggatcacatttacagttttgatttaatccgcagcccagatgcccgagaggtacaggcgggcgataaatcgactctcaagggcaaggatcgacaggctcgccgcagttcacggagccggaagcgcaagaagcccacaacaccttcatcgcaagaaagtgatggccgacatcagtcccaccgtcggtcagcagagccagataattttaggatccaatatgagaatggcgaatcagaggatgtcccatttcccacattatcagatagtgtcatagacaccgaccccgagaatttgctcgagcaggctcggtattctgtgctgaatgatgcccagcgattgagcatgcagattgcaaaggggttagtagaacttcgaaaggctctgttctcagaaacgacagtccgggacgcggcagggtccgacgaggtgggacccgaatcgtactcgagatatttttcatccgcactggaaattgcgtctacgtttcttccacaaatgggcaatgtcatgcgcgactggcgctatcccgtgaacccatcacaggagacagttaatttccagcaatcgcttcgtcgcaatcgccaatcgtcatggagatttgtccaggctgctggcacacttgctcatgcattggcagatcaaacgcaagttctggaagaatcaagtttccaaatgatcaggcctgcaccaggcgaagatggccctattgagctggcagctcagtttggctatgaattcctccgggcaattcttctttggctgcagggtggcaggcggcgtcttctagagggctttcaacaccacaatgcccctcgacgattacattgccgatttcctatcccagatgagtcaggagaggatgccatcgaaaccattctagtaccctacattatggaattggcccgtgacactccgattgtgaatgttgacgcctccagattcgagcatgacagtacgcgcattctgttccaaacccaacgggctgccgtgactgcatttgggaatgctattagattgcccttggaagatcttgggggctcggctgctcggttcgacagaagccgtgcttctaatcctgcctcacaaatccgctctctcgaccgggcctctgcgaagaggttctggattttacgagtgggccgaggaatcttgatgggggcaggcagtgaagtaaattacagatttgtcaacaatgctttcggcggacttcacaccacaacgaacgagtctaatgatttgaatgaagaaagggacccagtttataccgatcgcaatgcggaggaagaacgaatccaacacattgaactcatcggggctaggcaaaataaccctcggcctgaaatctctcgaggcggtgcaacttcttcggacaatagcgacgtcaatacagacgagaatgatagcgatgacagccatgcagaagattcaaccgacgatgaagaccatgatggctggcccatgcatttatcttcagatgaagatagtgagggatttgattccgatgacaatatgccccagagatatgccattagaaaggcacgacatgagaatgtcgagcgccatgctccatgtgtgcctcacatgagaagctatcgcggtcactgtaacgtcaagaccgtcaaggatgtcaattatttcggactagatgatgagtacgtggtcagcggctgtgattctggccatatatttatctgggaccgcaagacgtcaaatctagtcaacatcctagaaggcgatagtgaggttgtcaatgttgttcaaggtaatttccttcactagttaaaaagacaaagattaacattgtgatttaggccatccctatgaaccaatgatcgccgcttcaggaatcgatagcactatcaaaatcttttcaccagaccggaacgctcaagatgatgcccgtaatggtgtgaacatcctcgaccctgacaatccatcaaacgcgtttggacaaaacaactctagtatcggcggtctcgtgagccggaagcgagttcatgaaagctaccgtatcatgagccaaaacgatgttgaacgtcgtggtggtatgagtgaggcacacatcactgtaaattacttgccctcgatctctatataaatatttttgctgactattacctgaagcggagcatgctcgagcgcctggctgttaacctgaggggccgacatggcggccttggaattgatgatattgctgcttccggtgaccatcggaccgttgtcatcgacgataattgctcggtatgtcaggatttcttccttatacgtgggaatgatactaatcattcgataggtgatgtgatagatgaacaggcagagctctggatatctgcatttgcacagtgtcaaaaagatcatcagtctcataacctcatacatttattgtcatagcatcgcattacagtctctaatgcaagaaggcactcttttacttctttcattcctttcttcaaggctgcacctgccctttctatatttaggtaccttccttccttataaagccaagcaaggcctagaatacctactatcaccccaacaactacgagagccctatattcaagcaacactacacacatctggaaaagaagtagggcgccttgagctagctcttcttacaacatgttatacccgctgatcttacggcatatggtagcgatatgtgtacccctgtatgtgtaaattgcagacactggcggtattgtcagtcaaatccatactcggaaatgaccgaagtcttttttttggtttcgtcgattattttctatcgagcttattatgaagtgtactcgtgttaatatcaatgtgagtttaaatgatgatcccaagtcacaaatggatcaagtatcagttcaattagaaatttatgcccaggaaatgaggtttccttctgataattggcatgtcttcgttcttcgtctcgtcaatctagaatattagatggtacagtagagacagtggtgcggatatattgactagtggtgatattgctggcaacaatatattgggcgggtgtgtaatataatcagcaaactagatattcctatagatgcagatatggatttctgtagccgatattcgatattcgatataccttcacgtgaccgtccttatcgtagaaattttttgcgataaaaaaggaattgcccgcgcgaatatctagaggggcagatcacaaacttcatttataaaagtcaaaagtcatttgatattgtgtcggtgctttaggctcagctgctgtagtctaggtcccgctatttcccgaccactctacatctcctaacccgatatcacagctaagtatcgattctatactgcggttttggctgtcgaaaaccaaggagtgtgtaaaatttgttacatcttggaacacatcacatcatgtctgcatcagaattgctccaagctcgcaacgagacaaccactaggctctatgcagaccctcacaacccccacctccaccttgaacgaggcattcagtatgaaaagttgggcttccccgacctcgcctctgcagattcatatcgtgcgctagcactgctggagtcggtggttgacccagatgagtgcgagttccatgccaggcggaagatagacccttcccagcaggctcccaaaacggtggcgaatgaatcagatgacgaagacgaagacaacagcactgtgcctatcacccaagaggaatatgatgccatcattgaccaggtctatgtccttctagtacgcagtctcgtccgctgcggctgctaccgcgatgcattcgagttcggcgtgcgcgggttggccctcctcgagaagaggtctgcaacagcctcggtagctgctttgaacgtgcagatggatcgtgtgaaggaaatatacaaatctcgcaatggctctgaaacagaaaacatcgatctagactcaatcgatcccagcgtcctccctgcacagggcttcgcccgccgtgtcctctatccctggaatgggcacgagcctgaccgccgttcaccagagactctcaaaatactcaacgagcgattggcggtcattgcgccgaaatgtgaggtccgcgcagtggccttgccagtgctgcatgcctcggcagatgacgactcgtccggcatggacgtctccgtgcagctcggcctcttcgcgaaagaagatatcgccccagacgaaatcatcctccgcgagtcttcactgctcacagcaaccaaccgtctccacgacgatctctgcgatgcatgcaacgcaccgctcccagaactgtccgcggccgagccccccgtcgcctgcgagggtggctgtgtagatatcatcttctgcagccaggcatgccacgacacagcgcaggaggtttaccacggggcaatctgcggcctcgaggatggcctcgactctatcggcaaggatgtccccgaccctaaggataaggctgattacctgtaccttcttctgcttggcagagccctcgccatgtccgccacacaggacaagcacccgctcgacctgcccgagatgaaatatatttggggcgatttccatgatctcgatattgagtctgtctccgcggaaacagagataacaccaaccactgacgataccgccaccctccccttctccttccagctgaatgtcctgcagccggggcgtttcctcgacgaaatgggcctagatccatacgtcgcgctctaccgctacgatacctgggttctaaacacgctctttgctaagttccgcggcacggcatcaggccgactttcgacttgggatggaggcccggagctgtgcgctgttcatccactgtggtgccttgcgaaccattcctgcgatcctaatgtgacctgggaatggagtagcgaaatcaatttccgcgtgcggagagacgatgagacggctgtttggtcgcgtgggcttgagatgaaagagctaaggcctggcggtattgcgaaggattcggagatcctgaatcattattgcgatattagcttgcccgttcagaagagaagggaatgggcttctggggctttgggtgggacttgtttgtgtgataggtgtgtttgggaggctggggaggtggagtaggtttgtatttatgggttggtgtggattgccttgatagatcacgatgagatacccgtttaactgcattcaacgagaagatttccaatcaatgcctcctatagatcaaacacttattactggagtcatacaaggtgctctatttgaacatgtttatttgaacattgaggaaatgcaaccctcaccatgaagaataacacgtttttagtcttcaataacatacttcaggagcgcagtgacttcgcgctccagttttaaccaaacttcttatatttgtatatgtaggcgaacataaacatagtaaaaaataggaaaaattcattcaatgtatatcagtatgtttagtaaatatctattagtttgtcttcgatctaaaatatggtactgagatttagacttgatcaatctacgatctagaatattccttagacttgcgtgtgcgtgtgaatttcccgggcattaactatcgcctagtctcctttctgttttatacgtattcgtttttttgcacttatctgttctataagatatttattttgtaggtatcataaccgaagagatgtatgttaatggatatgatcattgtgctttgtttttcattcttctttttgtccctgcagctagttgagatggatgctcatataggtatgtatacttctccttcaggaatcccagagccactaagaggactatctagaaagaaaagtaccatatttgaggcctcatatatgttagttactagtgctaagattctaggcaaaactagtcaggaccagcaatgatattagtcagcggtcgctgacgacaacagtcacagcagtcacccgatgtgagtggactcgatcatttctaagacccatttcctctgagagattattggcattgtgtggaagagaacacgcgtatgacagcctccatctactccgtactcacccctccttttgatcgacacagccgtggatccacttcagatgagtgaccttcagaaatcatttgccaagtcaaaattggccaaatttccccccgaagcaccaatgcctgagtcaatgagccactcagaggatgcatgggaggatggctcttcggcttcctcgctgtcgtcgaccgggacgatggtcccgtcacctacgcgacagctattcgcccgaacgggacgacggttggtttacttctccaatttccataagctcaatttaggctcaattgcctatttgcatcatccaattgtctgggactaggctaatatacgaaaacagacaatcatctcaaacctctttgacatggacagacttctttgaccaggaactatttcttccggaggatgttgataatctccatattttacaccatgtctatttaacaccaccgactggatcaggcccgctttttgtcatgcaccatggggccggttcatctggactttccttcgcgacgtgcgcagaagagatccggaagatcctcccaaaggcggggatcttgtccctagatgctcgaagccatggccgcactgtcgttaccacattggacagtgagatagatgatggagctccttctacggcggctgcagcccaggttgaggcctcgggaaacgttgagctcgacctcagtcttgagaccctgagccgggatctagtccatgtgatctaccagacacaagctaggatgggttgggagaacctccctgatatagttctagttggacacagtctaggcggtgcggtgattacagatgtcgcgaagagaggagagctgggtcagaagctattggcatacgcggtgttcgacgtagttgaaggtactctcgtcttgttggtttatgtctatctgatactgacatccccatttgacaggatctgcaatggatgctctccagagcatggagaaatatctttcgactcgtccgacccgattcccatccctgctatctggaattgaatggcagtacgtgtccatctcgactgtcatttctttacattatcgctaacattacaagtactcgctctcgcacaatccggaacaccacttccgctcgcgcctcggttccctccctcttatacgaagaaagcgagcctagcgacccgtcccgcccttgggtttggcgcactaacctctccgcaacgaaacctttttgggaaaactggtttgttggcttgagcagaaagtttctcgatgcaagaggtggcaagctattactacttgctgggaccgacagattggataaagagttgatgatcggacagatgcaaggtatgggtttcgaaagtccctgtcagccatgtataataattcggtaccatgctcactacaataccataggcaaataccaactccaggtcttccccgaagcaggccacttcgtccatgaggatcagcctgcaaagactgcgcagatcttagcggatttttaccgacgaaacgaccggagtgcattggtgcttccgcccaaggtggcggatatgcaggcatcagcggcgatgaagaagggaactggtgctcctggtggctcaacagcgcaccagaggtagtatttcatgatttgtcccaatgcttgaaatgagatatgatatccaatgagaggctattcatagatgtaaaacacatgctttcgagcagtacatctataacgctctttctctaatgctatcacgtctactccgtacggttgatgaggttaagctactcgcatgtagggaaataaattagaaaaagtttcattctcgaacggggtgaaaagatcatttaggacaactagcaggctagcctccagttcggagctctatgccaccccattgcgacaaacgttaaagtgaaaaaaggaaaaacaaaagctgccgggcacagaaaaaaggttcttgcctctcgctcgataaacagagagaatcaggttttcgagattccgaacgccaccgggatcccatcacaagtaatcatcatgcgaggatcgtgaaaagggatgtgataaaacaaggagaagtaagggtatcctgagagagaaaaaaaaaagagagcgcatgacgccaagaaaaacggacctagatgccattttaaggcaaataggcaccaccagcaaccaccagattcatattggtgaacttgaccctatagacaggagacttcttagtcgggaacgcgctgatttggtcggcggtgacaacaacatcttttcccttctttttcttggtctggcttgtcgaggggtttgcggctgcatccagtctggttccagtgcctgattcattgaggatacggccaccctgagtggtttcctgggaaccagcaacatcccagactcgcacggttccatcggctccaccggagaccaacactgtggactccacactccagctgacagaccagattccacccttaccgtggccacgcatgcgcttcagcagtctaccaggagctagatcccacaagatgatgcagccctggtcgtcggcggatgccagaagctttccatcgcggctgcactccatcgcggtgatactaccagtgtggccagtaaacatgcggacagcattaccagtcgagacagcccacatacggacagtgtgatcagagctggcggtgaaaatgtatgccgagttggggtggaagcagacgacatccacgtcctggtcatgaccgacaaaaatacgctgctggcggatttggtcactcacccacaaacgggcggtcctatcagatccaccggagacaaagtagtgaccgaagggcccccagcttaggtcccagacagggcggtcgtggcctttgtagacaaccatacattgccagctatcaagggaccaaaggcgaactgttttgtccatggatgatgaaagcaaccagcgtgcattggttggaaccttgtcatcctccgaaatgccctcgcgagcagtggcgcagggctgaaatgcaacagcagtgacgggaccggaatgaccgataagacggcgcgaactggcaggtggtgagttatcaaactcagggtcagcagcttgaatgttcgtgccatcgaggctccaaatccggatatacgactgctggaatccgacggcaacaatctggctgtcatctgaaaagtccatgcaagtgacgctgtatatttgttagtaaagctctgtattacgaagattgtccagatgaacatacccatcataagtgttgtggaatgtgaacatgcacacactaagtccaggaccgacaccacctgtgcgagccttgatctcgaaccgatcacggtgttccatgactttcttcacctcaatttgaacgtcacgagcagtggacggagggaaaggaatatctgcacgactaggtgcttcgtcgtcatcttcattcttaatcatttggtcgaactcttgaatgagcgtgttacggccagcgagaggaggttgtttcgcatcttcctcggctaattcagcccgcacatcctcctctagaagctgttccatagggagtcttccgagtttcaggcgaggaagtgtgccggccatggccgggttgtcaccggtgtaagccgagccggggtggtgtcccggaatgccttcatcctcagccgggaaggtctggtctgcaccgatctggttcaacatggcagcgaaactgaatcggtcatctgctgctcggtccaaagtcttcaccgagcaaaagctgctgagaattgcgttcatgacagaacccccctccttgtccttgctctccaggaactggagaagattggtgtaagcagggttgcttaacacaacgcggtatttgttgtttcgataaagcttagcaacggagttatcttgcaggtgctccggtaagctgataggctcgaagtggcggacgtcatcggtatgctcgggaaggaacatgttcttgttggtttcgaagaatgacttcgcatcctgaggatagaaggaagtgaccatattgaaaaaggaatagacgaacagcggccatagaacacgccgaagttcaggctacaagacaattagcattggcttatcaagtcactccttgtctgtcgcaccttgtacagatcaagattttcctcaacccaattcttcagtaaatctagtgatgcattagttgctatgttgggtcacctgaatggaatatctagctcaccaaacccttgtcgagtcttgggacgagaatcttcccccagctgagggagcggacgcccatcaatctcctggttggcagattccatgcgcaacattgcctctgtacggctgtagcccttcttggccaaataatcaataacctagaaaataccgaaggttagcgtacaattcaaaccgaatgtatttgagcaggaaaaaaaaaggcaagataagcaagcggtgcaggaggagggcttagtgaataaacacactgccagatcacgttcgcgtgcctgctcagaagtgagggcttgtgaaggctttgcgatgggtggacacggcacatattgtgccggagtcatatcagccgccaccggctcatgtcttttctggatcatctgggccggtaaggtcggttgtgggtaccggcgaggctcgaaatccttgccgtgagtttccatggtgtgatgttttgcgaaagcggtgcgtttgacgtgaaagtgaaagaaattgatgggttgatgggttcataaagacggataacccgtatgaatgataacgtgaaagtgtgaagaatggttgggtgagaaccgcccgaagcaaatcattgtttggctctgagttgtgatgccttgagtcgctagtcacagaccttgagcaccgctcatgagttgcaacgcgtaataccagcaggtcaataatgcccttcgaagtctgtgagatgaaccatattgtcggcgttgcagataagcccgcgcggtcctctgccatggacttctgtcatcattcataggttgtaacgactgatgaacagcgtaattgaggactcatggcattttcaaaatcatcgacgttgatacaaaacgccccagagtctccgatttggatccctgacatcactttgatctagtggagttgtggccaactcaagctcctcaaactcggctgatcctaaaacacacaggatggacataacgtgcaaggaataatcatcgcaaagggacacagggacgggagggaaacaagacttctcaaacaatgcacaaatgaatcagaagggtacctactatttggttcaaattctgctgtgacatagcaccacttggtggtgcactaggccctggggtgggtgcggaatgaacggggtttccaggcaatggctgctgggaaggcatcgccataccattcccattgacacctggtcccatactgccactgcgtggtccagggcttggggctccaccttgtgccgacatagttgtcgattaattaacgacagcttcgagacagattctcagattggggtggaggatggaaactgagctgggttgcgtgcaatcgcgggcaatttatgatggtgttgggcggtcagctatcggttttttgtctaatgtatgtagcaaacaaaggtgttcaacaatagaataatgggtttgatatcttgaatttgatagttgctacctcaccgcctattaagacctccccaacttccggcacgtgatttcaactaacaagcttcctaagctccattcgttctacactggaaaagctggtggattgattcatacgcacccagctatctgtccttttcctttatatcaaccctgactagtcacaatgagtgaagacgcacccccgcaggagctacctagctatacctctgccgatcgcattcgacagctgaatgagatggataaagtactacgaacatataatttttgcaggaaccctttgctgactcttcttttctttgcaaggatgtcaccaaacttcttcattctgctggtctcgcgatccaagccttgaccaatgccaaaccaggcccctcttctgttgcaccagatggatcacttgactcgcacaaaacgcgattcaaagaagcaagtgcaaaatacttcgcacttctctcctcagccgatgtatccctccgccgccagatctactccttagaggaatcatccctcgtagggcccgagagggcctcgcgcgcaggggacgtaaaggctggagccagaaacgaaggagccgcgggagctaaatcgcgagctccaaactcactggatataagtcggctcaatagccggaaggatacagttggaaaagataaggaggctgaattgtgggcggccgctcgtcaattcgttgagcagatgcagaagccttccgagacaagcaagaatttcaggtcagcgaatgaactagatgatatgcaggtggattgagcgatgaattatcgattcattcggtgcgattggttgagtttgcttcatatgttcatgataccccgggctatctcctgccactggcgtttgagattacgaatacaatgagtgccattggagaagatacatacatttacaccgtactaagtacatatgtaatcaacgctaagaacaaagtgtttatggatcagtgttcgagcatgttcacagaactacgctatgcaaaaagagatgaaacggcaggtatagttcatcggtctagcagagtaaggaaaatattacttctgcatggacatgatcatttcccgctgggtttcccggtccctattcgcatcggacaatgggcccaagcctaggttaatgttagcatattgcaacggcggtgatactttgtgcatccacttacttcgcagctcgccaacgacatcctttgccttaccgaagtaaacctcctctgtgatatgaaagtctaggtcagtccaaaatcctcaagtcgttaaacggtgacgagagaaataaacgtacgtagcaggttccgcatcttcagctccatatcctccaccagcctgcccacattggcgacatggctagcatcagactctacaggcagatcaacttccacctggcgagtcatgttgccgctgaggtccatgtcaccaagagcctcagttttgttggccaggtggaggataacagtactagtgagtttgtaatgggacatgcgagcgcggtcggtggcctcaaaaacgtgaatgctgtcccattcgccggagctctgggaacccggggtgacacctaatcaaaaggaacagttagccacgatctaagatataggaagttatccgcaatatgtccataacgcacccttcttcagtagaatcacgccggcaaatccatcgtccaaatcccagaaataaacactccctacgcctccctcatagtacagctcgcggtaaacatcgaacgactcgttggcggcaacctctagcttgcgcactcgctcactgggcacggtgccatcctcaagtggaggatcaaattcattgctccatggtgaccggtagctatcgccgtcgcggttgtagtcgcagagcagatagtcgcggttgctctgcgggcagcggcgaatctccaggggctggtcaacggaggagaggagatcttcggtgagctcggggacgattgaggtgatggcttgcaagttggtcttggtgtcccgtgggttcaggcgccgaaggaggtcgctgcagaaggggtggtcagctcacttgtctccgactacacggggcggggttgagtcggggtgtgggattgtcatggcggggtatcatagttgagttaaaaaagggtctatatggccatattaattgcgagagagattactcacagcgcgctgtcaaattgtgcatcagccatggttgcgaaggttggttgtatatctgttgctcaacagatggcggtgttgatcttgggcggatgaagtgcgtgtgcattttaggctgcttgcgtggcattacccgacatctataccaatcgtaatacatccacttctatttgcatccataaaaagacaagaaaaagttagacgaacgtagagctagtgatatctgtattcaagctttgttttatttgagcatatttacttcgaataccggcaaaatcttacaaggaaaagaaagataggccaatgtcggattgttggatcttcggagtttttaaaagaaattgagaaaatcattattctcggatgtattcaatgtgcttttctggagaatatagctattctaggcccatcattcgactaagtctgtgagtctggaatatcttgaagatcttcgacaggcgtgtctagaatgcagggagtataaaagagaatcaacaagttgatgatgtgaataaaaacctctcttaagtagaaccagaagagaggctcatctcatcctgccaccacctcgcaaagatattcaacctctccgtccttaccttcgccatctctctccccgtggcagtcttcatcatcccctccagcttaaccaacttgtccccaaaatgctcaatggaattatccatctcccatttcccatcaacacagtacttctgccctacagccccaaggaaagtaaaacacctgccaattccaaccgccccgattgcgtcaagtcgatcggcgtcttggacaaccccaagctcgacaaacccatcttcatcaatcatcctccggatcaacgccggatctttgcattcagtcgtataagaaacatgtgatatgacggtctgcacccgggatgcgagttctggtgtcgcaccccgcgcaaggagcgcgtactgcaccatcgtcgttgggtcgagttcttgacttccaggagctgcgtccattttggataggtactttctgtcaccgatgtcatgcaacagtgctgcgagcttgacgactgccccgttgtattgcgttgtcgggtgcagtgtccgctctgcttccaggatcttgttggcaagcgctcccactctgtgaacgtgtgctgggttatgcgatgggtcatggcctgacatgcagtcagtcacgaaagcggacatttcgttgaagagcgtttggaattcttcactggtatcatccattgttgatgattttgatccggttgttgtggggttggctatttttggttggttcggactgaatggtacccaagacctatgccaacggtgcagatttgattttattaccgggatgactattggttcttattttcctaggcaatagcactatattttgaagaaagtaccgaattatccccgcagtaaacaaatttggcggtgaatgacactcatctcgttttatatacaccgtgtttagtgcaaaccatacaaacaaaacatgatcacctgactacgcgacgcgacgccagatgattgcacatacggagtgcaagtgcaatgcctttcaactatccacgcgatgtcgacagattccgagtcagattactttgatgatgatgacttcgtagtccctggaacccctgatgagccctcccgtcccgcaaagcggcgccgcattcgaaatcgcggggaagagcgcgaagatcaagatgacgattcctcaatcgactcgttctttgatatgggcgatgacgagttaccccctgggcgccgagaatcacctcatcaggatcgctccaaaattaagagctgtgtactgaagcaacccagtgttcaaaatgacatgtttgtcacgcaactcacgcaaccctcctcaagtccggaacgaatacggggcgcacggtggcagaagcctacagtgaggccccctccgccaaaatttgaaactagaagacaagatggtagtggtggacaggagaatcatccccatgatgatgaagagctgctggccgctctcgcagcttccttagattcatttgaggaggagaaaacgaccagagcggtataccaaccctcgagtttgtcaagcaatactgtttcgaaaaagattgtcctgccagaaaagacagatacgcatctatcggcggatgtgctgtttgagctggaggacataccggaaggtgcattcgattcttcgccatcattgtcaccagtagcgcgatcagcccagcctgcaggtccacaatttagtcaatcccgaggcccaattagaggacctcatctcagacagactacattattcggtatggccacttcaaaccctgaggcctcggaaccgcgccaacaagattggggcccgtcagagaagactgaaccaccgacccaacacaaacttgtcaaagatgctttggatacatgggtctaccctacgaacttgggcaaaaccagagactaccaattcaacatcactcaggcaggcctgtttcataatttactcgtggccttgccaacaggattgggaaaaacattcatagcggctacaattatgctcaactggtttcgctggacgaaagattcgcaaattatttttgtagcaccaacgaaacccttggtttcgcagcaggtatcggcctgtttggatattgccggaattccacgctcggagtcgaccatgctcacgggaggggcatcaccgggtattcgcgccgaagagtggaaatcaaagcgggtgtttttcatgacaccccaaacactgatcaatgacctaaagaccggaatcgccgatcccaagcgaattgtgttgttagtcgtcgatgaagctcatcgcgcgactggtgcgtatgcatatgtggaggtagtcaaattccttcggcgcttcaacaacagtttccgcgtgctcgcactcacagcaacgccgggatcaacagtcgaatcggtacagtcggttatcgacggcctggacatagcacgtgtcgaaatccgtacagagaactcgatcgacattcgcgactatgttcacgctcgtaatatcgaaattgaaacatttgagaattcagatgaaatgattttctgtatggatctcctatctgtggccctgcagcccttgcttgaccaacttcggactctcaatgcctactggggacgtgaccctttggggctgactgcgtacggtcttacagtggcgaggcaacaatggatgcagtctgacgctggccggaatgccaatttcggcttgaaaggcaaagtcaactccattttcactgttcttgctagcttggcccacggtatcgatctcctcaagtaccatggcatcgtgccattctatcgcaatgtcatccatttcaaatcaagctccgagggacagaaaggcggaggtggtaaataccaaaagcaagttgtacaacatgatagtttcaagaaactactcagccatcttgaaccatggagtaagaatccagagttcattgggcatccgaaattagaatatctcaagtcagtgattttgaatcacttcatggacaggggtgaagggaaagagttgcctgacggcactagtcagcccacgactcgtgtcatgatctttgtgcatttccgtgacagtgctgaagaggtcacgagagtgctcaaaagatatgagcctatgattcgtcctcatgttttcgtgggtcaatcaagcgccaaaggctctgaaggtatggaccagaagacacaactcagaaccatcgaggatttcaagaagggtacatataacacaatcgttgctacctccatcggcgaggaaggattggatattggagaggtcgatctgatcgtgtgttatgactcgtcggcgtcgccaattcgtatgctgcagcgcatgggtcgaactggccgtaagcgggccggtaacattactctgctattgatgaaaggcaaagaagaagactcctatctcaaggccaaagataactacgagaggatgcagcaaatgattgccagtggctccaggttcaagtttcacgacgatcgttctgcacgcatcttacccgcgggcattcgtccagttcccgataaacgacatatcgatataccccaagagaactcgcaacaagaactgctggaaccgaaacgcaaagggcgagcaccgaagcgacctgccaaggtgttccacatgcccgatgatgtggagacagggttcactcgagcctcgaatttggctggcgacaaaccccagaagaagaaggccactgtaaccaaaaaggcaaccacccccaaaaagagaccccgggcccccacacccgagcctgtagatgttccgttgctggaggacgttgttcttagcacgagtgagcaaaatgatcttgagcatcattatcaaaacatcggtgctacttctccgcaattcatccgattccctcgcaacgacgcctttccacgtttgcaacgcattgaaagacccacaaaggatgtgaagcatgggtctctcacgcgacgcatggtaaaagccttacagaagatgcacgaggctggccctgactgtgatcgtcgattcaaagagattttggcccgcgaaccgccttcgcctgacgaatccagtcagacgcttcggagggattcagccaagaagcctgggcggaacccaaaccctttgaaaacaccgtctaaaaatactgctcaacgagcttccatcaaggccactctcacccccgctggcggggaggttgtttctttgctgtctccagatcgtgaacacaatcagaagaacgacccctttaccttcatggatgatgacgatggctcggattttgagttgatggatgccagtcttttgtttagtagtgggtctaaatcgaagagtcggagacagaacagaccaattattgaagatagtgacgagtgatgaaatagaggcacgcgttgatgttatctggatatagaaagatccttgcctcattcgaacgtaggaatgatattggatacagttgcattcccataactagacctacatgggtacgtacaatactgaactttatcgtcttcattttgttcgtcgcagaaaaaggaacgaaaaggatggtaacttggaatagattgtatttttttggggcttcgcagctatctgtttcttggtgattgtattccattctagcttagggcttgttgaaagagtgcataccactcccgctgccttcaaaaaaaaaaaaaaaaaagaccaacctggctgtaaatcatcaccgagtctcccgtctatcagaacataagaacattcggggttggggtctgggtcattgggtatttgtgtgtttgtgaatgatatcaaacgtgtagtgtcaatccgagagcaaagaaatcagaaagccgaaaacaacccacctcgagagaaagatagataatatgggtttatgcaagtgtttagtatgttgaaagccaacgcgaacgaaaaccgaaaaaggagaaaggacgaaagaagaagcaccagactccagttgcgatcagcgacgaggcgcgagcacaacttctaaatcaatgtaaagagtggagagcaaaggaaaaccagacaaaaaagagtcaattagacgcggtcacgagcaaagtcaaggacctcgcaatcatcctcaaagaaaccgtcgtcggctttcagcggagcggagtgtctcttcttgcggcgggtggtgataacaacttcctccacgttgccggtgctgtttccaagtgtgatgaggttttctatatctccgccagccccaagcgagtgtccatggatgacagcgttttcatcttcgtcatcgccgtggtcatcgctggagctgttgaatgacctcaagtgcactttgatcagtggtatatcattgccaaagacccattgtccactcggctcacttgcatcgctgcctgaggagaagacactcaaactgacacgctggtccgtgtggaacggctggtatggtgtgtttgtctcgatctcagcctgcgagagaggctggcaaaacgatctcgcagcactagatggttgatagctgaccgaaggtagaacaatagaggcatgaactactacttctggatcaaaagtagacaaaggagccggtccacaaggaccctgaagattatcaggcagtttgacctgggactccttaccgccaacaatagagtgaggctgcctgctcttgtggccgggtacagtagcacgcttgaggcggtacatcttgaagtacccggcatccagaacacccaagaatataaggcccttgttgcaaatccacgtcacccgagaaggtgcaggatctcgagctagccccggcaagtggagacgattctctccggcatggcgtagagtattgacagtacccgttgcggcgcccattgacttgcttaggcctgcggcgacaaccttcccgctcttcacactggcagcagaaggtaatgcaaatccactcatattgggaaatgcagcgcccgtggacgggacacgaccacggacagcggagaagaatggctgcgttttaccgccaactaacttcatggccgctgacaatgggttactaccggaagcttgactggtcatctcatctgccatgggatcggtagccggtggcttatttgcagtagactttgcacggcggaatgggggccactgaaatgcgcttcggggtagatcgaaaacgtggacggtgcctttacgtgtaattacggccaatctatcacccaccggtgccgtccaaatcacatcaacgatactcgatgtagtcaaccgtgcgtatctagcaatctggcgcacattgggattctgtcccgtctggtcatcagccataaaagccatggaccggcagtgcttgagttgcatgagatcccacacgtattgcacatcgcctttcttactcgctgtgaacaacatcaagccgttcggagaaagagacaagaagctgcaaccattaggaacctgaaatgtcgacactgggtggataaatgcatttcggatatctgtgccgtcttcgaatcgtcttaggtcgattatggatacggtgtcaggctctgttgctgatgtttgtgtatcctgagcatgggttggagggaataatccatacccctgtgtctggaggtccaatccctgaggtggccgacgtggagagctgccggatggttgctgggtgttccaataattgttccaggcctgcattccctgatcacccatccagcgggcacctctgacgagttcttgggcaacgcctctggccattttgtcgaagaaactttccccttctcctacatctgtcgcacacgacaccgaagggacagcaggaggactgcgagtttcaatgcccggaaccttgccgatgattaaactcgaaggtacagtgccctggatcgatcctctgtaggccgaggatgggggagcgaatgcaagccaccttccttgtacagctaatatgggcctttccagggtagagaaaccatggggagagtcggtgcgagtcccctctggatcagttgtagaacttgaagaggttgagtaacgacgggtttctttggattgaactccagtccatgtcttacccaggcactggtatgcagttgtttccggggataggatatgtctataaacataaacttccccgctgacgccggatgccaagataatgtaagcaccagttgtgaagatctttaattttcccacaggcgagggtgcaaaggatgggaggccgggaagattttctaggcatggcacaggcttacttgcaaacagggtgcagacatgttcgctagtccggaaagagtaaatctcaactcgggtttggtagaactggatgtcgtctcgcgcgcacttgtcgtaggagtgaccgcgaatagtcgaagggggaatttcatttgcgtccgatgttgcagacgagactcgaccttcctcatcatgcggcggcaacggcccatgaacaatgacagccacatgcggccgagaggatgcaaagggatcactagacgggtagccaggcaagagtttggcctcaattacacggccatttaatccagtgatctgccccacgagcctagtctggcgatcttcgatggcgaggatctccacggcaccatcgatcccaaccagtaagacgttcattcctgtccgcgagcctttagatgacaagctaggcagtgtatcaaagccacagaatgaatagtttccctcggcgggggaccgattctgagttggaataatctcaatgtccggtgctccgaagaaatgtgcctgaggaagatgtgggggaggcgcgtgattgctcattgggctcccgtaagagtgactctttctcctgtctatagactgttgcctcgagtgtagaccacttcgataggcattaccatagctagatggtaaagttcgagtctgaggagatgccgaggaaggatggctgaagccactcctttcttgaattgttggaaagttcaagggtgatgtactaggtagtgatgcacttggtatatccccatccataagatcggtgggggggctctttccataaggtaccgattgcgcccacgtatcggtgcggctagtgagatcgtcacctgctggctcatcgagggaaccgaggacatccagaacaggcgacgtgatagatgggtttacatgacgttcaataaagggttcagggtctgggcaggagagaggctcctctggtagtgggtcatatggttggatgctatccgtgaaatctggtgttaatggcactcattcatcagaaaaacaggcaatcaccggtggacacatacatatcatccggtggggtttcagttgcagccctggccaccttgttcttcttgcccttcttctttttgcctttcgcacttggttcatgctctgatatagtccgatgctggtccggggcgaatgggctatcgtcttcgggcaaacggctgtgctggcggatgatatcgtcaggtgccgccgggagcattcaaatagatgatgcctcagtgagaggcgataaagaagcaacagaacgaagccgctctcagtaccttatttgtggtctgagaacggatatgcaggatccttctgttcaagatcctaactgggaaccgggagcttgggaggtatgactaaagaggaggataactttcatagaatcaatcaagtgatcaaacatcacaacggcctaaagagactggggacgcgtacctgttttgacagtatccttaaaaataagggagttgtggtgaacgtagacaccactaacagcgtatctagagcggagatcaccctagacacgcggggaagctttgctaaataagtataacacagcaacagcttgagatagttcaagctggtgcagaaaaatgtaatccaaaatgacttgcatacacaagttccaaggtcgaagtccgaagttgagtcaaggaagaaggatgatgttatggttcgcgataagaagaagagggggggagctgaccccaggtcaccagtcaggtacggggctattagggtgtaataggggggcctgagtcagagcacgaaataaccctctgacagtgtcattcctaatgaaagtatgatcggattctcggtctttactctcctttgtctgtctttgtttctatcaccaatcttgactatgactgactatacaatgcaccttgtggcctacacgaacaagacgcatatgaggggaaacttgtcaaactatgcaaacaccgataaggctcttagtcatctcttgcgtcatggattgcttgctgcaaacgtccccttgctttgacatggtactgcatggttgaagtcaacagccgagtccatccgtgtccttgctggtcattcttgacaattccttgtttgtttattcaataaagttcgcctgttgaaggagtggctggtgtcatcgttggctccagccagaggtcacagggcatttgcggcatggccaaagatgacgacttgcctgggctttgacagcaaatgccgtttgagctaggaaatttgagctctttcgttagggctacgtggtaattcggttcatatatatttacatatatatggccgctttatcctccactattcttgcgggccatgttaagtatatccagactgaaagtgtttgtaaaacggttaatgtaataaaattaattaactcgagacgtgttttgatagccactgagctttgaaatagttgatggtacagaatgttatcacagagggttgccctctctcctgatatgatatccagggtcgcttaggtcttcttcttattggccgcggccttagccttggctgccttcttcttgttgctattgatcatgacaattccgataaaggtgcctaccacagcagaagccaagagtgttaggatgacggggatgcggatggcccaaacacgaggcgggaagatgtcgtggagcgggtggccggggtcgacgaagggctgtggaacaaaaatgagtatagaaaagcaaatattatcataaattagcataccatcaacagggtccacgcggtgtagtagagaaagatcgcagtcgcgaccagaagcatgacggatcccacgagttggcccagctaaagcacagtcagtggggtatttccattggataagactagataatttaccattctgataaagagcggcgctgttaaaagaaaagaaatatgaaggaacgtggatgaatcctgggctggacagaactaccaggaatctcaggagctcccgttattcgaagttggcctctggtcacgtgcaccgcgctagagctttctcctgctgcgtccttgaatcatctagtaacctcagtccggctgagattcacaaccactgttcctccggtgtacatcaaactttctagctaccccggaggcctctctcctcgttgaagatgtccgatttggatgttctccagtctgctgtgcgcgtgcccacgcctccacctggcgcgtcgtactcgccagccgcagcctctcgaaaacgctcacctccatctcgttcccctcctccaaatcgtcgccgatcccctcccggtgattcccttcaagatggttccgatgttctcaaagccgatgcagaatatgccgacgacagagaacggcaactcactgaacgtgttcgcgaacatgagaagcgcgaagcagcgcgcaagccgatgaccgaggaacaaaagcaggcttcagcaaaggcagagtacgaaaagctgctcaccatgcgatctggtggcacttacatccctccggcccggctccgtgcgttacaggcgcaaattacggataaaacgagcaaggaatatcagcgcatggcatgggaagccttgaagaagtcgatcaatggtcttatcaacaaaattaacgtttccaacatcaagttcattgttccagagctatttgcggaaaatcttgtaagaggccgaggattattctgtcgatcgatcatgaaggcgcaggcggccagtttgcccttcactccaatttacgcagcgatggcatctatcgtcaacaccaagcttccgcaggttggcgatttgttgcttgcccgattgattgttcaattccgcaaggccttcaagcgaaatgacaaagcagtctgcatttcctctacgactttcatcgcgcacctctgcaatcaacaagttgcccacgagatgttagcagctcagatcctgctgcttcttttgcataagccaacggacgacagcgtggagattgctgtgggtctcactcgtgaagtcggtcagcatctggaggaaatgaacgctcctatcgcacttgccgtattcgaccaattccgaaacattttacacgaggccgatattgataagcgtgtgcaatatatgatcgaagtgctctttcaggtgcgcaaggatcggtacaaggacaacccagcaatcaaggaggagttggacctagtggaagaggaagatcagatcacacaccgtgccggcttggatgacgagctggaaacacaagacactctcaacatcttcaagtacgatacggagtgggaggaacacgaggaggcctataagaaattgaaggccgagattctgggcgaggatagtgacgaggaaaatgaggacaggtcagatgagagcgaagaagaagaatccgatacggaagaagtacagatggatattaaggatcagagtaatactgatctagtcaaccttcgacgaacaatctacctcacaatcatgtccagcattgatttcgaagaatgttgccacaagctgatgaagatcaacctgccggccgggttggagcatgaacttccatccatgatcattgaatgttgttctcaggaacggacatactccaagttctatggcctgatcggagaacgattcgccaagatcaaccgactttggtcagatctgtttgaggcggcctttgccaagtactacgataccatccatcgttatgaaacaaacaaactacgcaacattgcccagttcttcggccacctcatcagcaacgatgcgattggctggcatgtcttatctgtggttcatcttaacgaagaggagaccacatccagcagccgtatctttatcaaaatcctattccaaaacctcgccgagaaccttggtctgcctggacttcaggcccgctttagggatgatattttgcggccgagctttgagggtctcttcccgacggacaacccacgtcacactaggttctctgtcaactacttcactagtatcggtatgggtgtattgacagaggacatgcgtgagaacctgaaaaccattccccgtcctaccgtgcccgctttgcctacgcgagccgcctctcgaagcccctcgcacaccccatctgatcgatctcgttcatctcgttcgtctcgttcgatgtgctcaacgtgcactggatctcctcactcccgccgttccaggtcaccttcgtactcccgctctccttctagggaccgcggccgttcctattctcattccctcactccctcttcccggggtcacagctacacaccttcacgctctcggtccccagtacatcgccgtcgtgacgcatcagacagtcggtcccctgtccgtcaccgccgtcgtgacgcatcagacagtcggtcccgggcccccgcaggacgatcccgatcccgatccatttcccgtacagcggccaagcgtagtcgagcacgctcccgctcctactcgcgaagcccaagtcgcagtccctatcgatctcgtcgctcggttactcggtctgtcacaccgccgcgccgaggccaaagccctcctagccggagaaatcgcagctactccagatcagtttcccggtctgccaacacccgtacctcttcgtgagccggtttcccgaggttcaaaccaagattcgtccgaatccgtgtcacccttcatatcattttcattgtagatcttttcactagaccaaaacgagtcagcctagtgggggtctacgatcaagtttcattgcgatggctcagggtcgtggaagagtaatccacgaaaggcctatttctcaatatgtaatagagagccttttaacaagaaattccaaattagcttctcggcattttcccacagaataggtcactaattcggttttctatatcgtgtcgtaaatcaaactgcccgagcgcatcaatattccaccttgcaggaattgccggattttgctaaaacgcatgcaccccgcatagtttcgatcccccattaggaacccaaaaactatgtcaaaaatggttcgagtctgaaaggaaaccagtcgcctatgataatgtgtaatgaaagaagggttaacaatcgtatcaaagaactggacaagggcctggcaagagggtagggctaggaccaaggtctggtaggttgagttttgatgctaaagatgagtttattgaacaatgctagcgagaagatcatatggctatagtatgaagccagggtttctgtagagattatgtttagagaaaccccaagataaactgcagtgtagtgactttctagggctggaaggttccaatctttacaaggcaaatttcaatacttcacggtgtgtttattgagaggtcatctctgccctagtttttctccccttcctgtcttgattttcagcgcggttatagaacccctagattccaatacgagagattgccctacccatatcgaactaaactagctctacgcctttctaaaagatcttccacctttactgtaaggatgtttattgggtatatatttttcgtagaacactttactattattggcgaaatatcacgccaaattcctgaatcacctacgtttttgatatcaacttagcttattattgatcaatttagtcgaaaagccaaaagaaaaaagtaagttcaactatagaaatgtctgtcgagagctttgttactgaaactaccactccgaatcatcgctctggattggttcttcgtgctggaccggttcctctcctcgggccttatcggcccaagcctcgagcttcagagggcttctggtgcaataaatcagcacactcctggtggccatcgtgtcttccagcgcactgtgtccatttttgcctctctggatcttgtaaccaatcaactcattggccaaggttttgagactccaagtccggcggaaaggttttgcaagcggtttatacaccgcatcggcagtgagaatcgcagtgtcgatgactgtggagtgtataatgcccaggacgttcaggtcattatggagggcgtgaccaacgagaatagtcctgctatccatatgctcaaaaagcatggcccgagctaccttccaacctttaattgcaacccccttcctgaccgcagccttcatgtcagcacatgttacaccactccatctggtatgccagtttcgaacagtgttggtggggtggacgaaatggttgacgagaacctctcctgtgaggagatccaccactaccagaaaggcaagctcacggcgattgcccataacaccgaccatctcacagtcaatggcaatggcctttcgactggtttggcttgggtttgatgggggagtcgtcataaattcattgtatctgatcacgcccccggcggggcgacgagaaggagcaagaggataactggccacggttgtgaagtgctgtttcttcagctggctatctaggtgaacacaatcttgcaggtggatcaaaagccactgctgctcttcggggttgagaatgggattggtgtggtcatcaggcgtgatgatgggattttcgtgatcctcaagggtgagaatgggtttggtgttgactgtcattttaagcgtagtttggagtagttgtattagttatagaagctcaagttgtcgctcaaatggtgaaagtagtatatggttgatgttgagtttcaatgagatagataagtttggaagggaagaaatctattagggattggagtagacaaatagaaacaaaagtgaaatataggagtcgaatgcaccaggcagacatcgcaaccatgaacagacaccgcagctgtaaaagaaggcgggcttgggatatacttcgaaggttgcaaacttttgctcatagccagtcctttcagataaactcactcgtctatatagatccatagacaggcataatataagttcaactcggaatagtcttttctctttatagatagcgagatgagtgaatttggaacataagccattagccataccataccgtgtcttgttcatcgtcatgctctcgcgaacatcgaccactttctccccaacactaggtgagaacccttgccacgcataagggtccgtctctcggacttcgactgttgccattctatcgctctcacttatcgagtctgactgattctgacaagctggcagagtgtcttgacagccttggttgccggattaatgtcagtccacatggtggagggtttgaagatgaaaacagtgcaggttgcgacatttcaatttgaggagggttcgatacggctcattcccgagtacatcggtcttgccatcttgatgaatgcaattcatttctgaacaggacagaacataagaaatggaaagtcggaaagggccgaatggaactccaagcttgacccctcacctgggcattaccagagataagccagataagcgcaatttataaagctttccccctgtccagatgattttttattttttattttttatttgaaatattttctatcatgaaatatcgtttgtggttggccggcaaagagcaagatgggaatgcagatctgtgtgtgacggctatcttgacacttgaaccagcactgacaagtctacagcattcccattgaagatccggcaactggagagatcttcgcgcagtaagctaactcggagtagcgttcgatcccgtctaaccattgccagatgccacgcagcctcgccagaagatgtcgagaccgccatctccgccgcccaggcagcatataagtccggcgtatggtcgcgtgcgagtcgtcaccatcgtgccgatgtgctagagaaatgcgcaacgcttctctccgattccctcccgcagctcatctcaacagaatcaaaacagacgggtcgggtgattcgggaaatgaaggcccaggtcccatctttgacaaggtggttcaaatactatgcctccctgctaagagtcgaggagcgatccgttctaccgacgatggggaaactgcataactttgtcgaccgagtccctctcggagtggtggttcagattaccccgtttaatcacccgttgttgattgccgtgaagaagcttgctccagcgcttgctgctggaaacagtgtcataatcaaacctagcgagctgactccattgacaactctcttgctgggcaagatccttcgcgaggcgggaattccagacggcgtgttgagcgtcttacctggttatggagctatcaccggtaaagcactggttgagcatccattggtgaaaaaggtggacgtgactggtggcaccatggccggaagggcaattggtaggattgtcggtgggaatctggcaaaatacactgcggagttgggtggaaaggcgcccttggtcgtgtttgaaaaggccaacatcgatacggcgattaacgggatcgtctttggaagcttcatcgcaagtggtcagacatgtgtggccagcactcggattatagtgcaaaactcgattatggatgagctactacacaagctcaaggccaagattgagagcattacacgccgaattggtgctccaagtaacccggagtctaccatggggccactcatctccgagaagcagctacaaaatgtggagcgccttgtcaacagcgctctagatggagggaatgcggtcgctctcatcggtgcaaagcggatggtttctcaaagcccgcttgacggatttaacttcgagaggggatacttctacgaaccaacgctacttgcatccaacaacgggaataacagtattgtaaagacagatgtctggcgcgaggaggcgttcggccctgttattgtcgttgctggtttcgataccgaggaagaagcaatagcattggcaaatgacagcgagtttggattgggagccggtgtatggacactcgaccttccccaggctttccgagtttcggagcagattgacgcaggaattacttgggtgaatacccatcatcggaatgaccctagcagtccatggggaggcgcaaagtctgcgagtggagtcggaagcgaaaatggaatcgaggcttacaatgcctacacaacatcgaaaagcacaatcataaattatgcgtctcccgatgagtccttggctgcggatgactggttcggagatggctccggcaatgttagatatggttgaatggaatcatgttgctggtttctccggactctgttgcacaaatcctcgaagggatcagcatggatattagtgagtgtacatatgtagactaggtaacagacattattagcagaatacttcaaggcaatcgatcatatatcagttagaagagattatgtccagaccaatccacctctcaagtgcatttcacttcggtctgttttctacaaattcgtatcttctggcaaataaatgcataaatacataaagctagaacccagaaaaattagtaggtagtaaatgactgctagtacatactcgaatagccaagatatagatctaaccggtaagggaaatgcatgatgtcatacccatcagcccagatactagcaggttgggctttggttcatttcttcaagcatgcatcccctcaaataaattaatatttatgaaacctgttaaatcaaggaccggtactaatcttcactatgtcaatctggggtcgcagacaagaccataagcccacggagccatctggcacacaaaatggggatgaacatcggcatgcgccagaggaaacattcgaagaacctactgagcgctcaagattacttcctgcagatagtcatgaggggtttctaagcccagatgatcccgccgtgagtccaacaaacaaagctacaccaaataacacgctggaggcaaaaatcatagctaacacgagaaccaggtatcgccctacaatctatggagcgtgcgcgcggtgcacggtgcgtcagttatcgcattggcaatgagcttcatatggtggacattcctgcttgtctccatatttgtcagtccaccgatgatccacccgcgagggtcgggcttctttgccttctcatataccaccttggcgacaggatacctcgtccttggactcttatttttcgcagtgccatccaagtccatgacaatatgggccattatacttgccgttctacttttggttgatatgtttattatcctggctgcgccgcggatccgtcttgaagaaggctgggtagggattgcttctgtcgtctgggtagctttgatatctatataccaggccatccagaatcgagcagttgcttggggtaagcgcgaggaggaagagcgtcttactggtcgagaagagactcggcgctccctactggagtggattgctgttttcgctgagacgattctaatggctgccatggcgagcgctgccgtcatgttaacagcgactctgatcttgcgtgctttcgactctgggctcgaggctccaggcgagcgatacttggtgcatgcggatagctaccaagttcatctcgcttgtgtcgggaacaagactgcagacgacaatgcaccgacgattcttctagaaggtggcaatggaccagtcgaacatacattacaaccgttcatcgacgatgtatacggccgtggcggtatcggcagatattgttactgggaccgaccaggtttcggatggtccgacaacgcaccctcgccccattccgccggcatgtcagcggacgtgctagccgaagccttggctcttgcaggtgagacaggtccatggatagttgtttccgctggagttggcagtctttattcgaggctttttgccagtcgcaaccttctcgaagttcggggcattttcatgatcgatcccctccacgaggcatacttgggagacattgggcgacccggtcgtgggtttttgctctggcttcgtggtatcgtttctccgctgggattcgatcggctcgcgggcgctattttacgcgaccgttctcgccaggaccgcgttatcggacgttcggcttaccagtctggaaaatacatcaaagcaaagctacaggaaagcctcgtggctgtcaccatgactgcctccgagatacagtcttctcgccatatccagatgggccatgctcctgtagtcgttgtgagctctggtcaagaagtccgaaagaattcgcagtgggcagagcgacaggaggatctgtctcatcttacagataatcttttgtcttgggatattgctgacgatgcaccccatgaagtatggcatactggacaaggacgggcgatattggaaagacgtttgaaggagcttgtccaagaaagtcaggtacaaagacccatgagcaagtgatcactagtttgacatctttattcgggcgttcattgggattcaaataccgtacagaaaattgccacaattgtgtcttataaaatattatctctgcgaagctgatgatgggggatatgatgctatggcctagtagtacctccctcgcctgacgcgacgtcgctacatatgaatgaacatcacttgtatgtcggtttcttacttagtagcatctatttcgacgaacacattaatccaatcgagaacttctaccccatatctagaagaaattagaaaagcccctgaagcgagagcatcagtgaatcatctaatctcaggacacttcctggagggctgtaggatgccaactggatttgaggtatattcgtaataaatgcagtaaattcgggcagagctttagcctgctataactagccgacggatccaaaacttccattctcgcatcgaatctccatttcgggtccaggaatcgaagatatctcggggaaaaggcgatgaatggcctcctcgtaacttttaaggcaacgcggtgggaaaaaccgagccgaagggtctagggggagtgcgatgaaaaccgaacggcgggaagacgaaaccgatcactctaaactagctcccttaaacctcttagcaagctggtcactctcggggctgggagatatggaccggggtaaggtggagggtggggggttgcgacgtttccgggtttgggaatccggacgagaaggctcggccggtgtgggccaggggcgcttggggggccgctcaccactctcttgaagaattgtcatcaatgtggcccatcctggggtattcacaagttgcatgccctcggcgggggacttcgttctagcgacacggcagaggagtgattcctcatcctgttcgaaaatgcgagttagcgtcacgtacactagattgaattatacacaatagaataccgaccttgctaaatgtgcctactccatgcaagaagcacaggaggtggaagtcggaaacgccttgaatagctttatctggatcaccatgggacatgagttgctgggcaacgtgtcgaagatcttggctctcgccgatgacttcccgattctcgatagggaagcgactgttgatgaataatggggatggctctgttgggaatccgtgggtgagggtgactagtaggaaatcgactgggaaactcggctcagcgctctcctgtacgcttgcaccgtactcattaattcgtcggtagaaaacttcggggatgtatcgtgtcctgcttccgagatcttcgtcatgctctgattgcaccagcattacggtcgggtctgctgagggttcgacgatatctcctcgaaccatctcaactgcagacacggatgcttggtacgagctgatagcaatcgcacctgtctcatctccactgagcacacacgttacaatatccgagccgaactgtcctgtccggctccatctcgttgacttaggattttgtgcctggagtcgtgccgcgaaggcaatttcgagtgaagacaagaagtatgaatcaatgtgccgcttacaaaccactgaaccatccccaagcccgccatcaatcaagtcagtaaagatgacaccaaccttctgcaatccgcagagacgagctacctcgtccacttcattttcgttgtgccagtcatggagtgttacgccatcgatttcgcccgtttgcgggggctcgtagatcgcttccacgacagccttgacacctagtggtacttcggtgtattcctcgtatgtaccgtacaagaaacctaatcgttgagcgcctgactttcgccagaaatcaaggagggaattgattaaatcaggggatgagaactccacatggtctaccatacggaattcctggggttgcagactgattgcgcttggttgacatttggtgcaaattccctccggccaaggcggatgccccgatgggcagtcgcttcgcactcggtaatatggttcgttgagtggaggcatgaacgaggttcccatttcgggcttgttagtcgcggcattgattttccgcaggtatgagtggaaagagagatgcttgattttcttctctttcatgttgttcgcatcgtaaggctcgagtggcatgcagtaatcacacatgcctcggggaccgtgtctgcacatcttgtagtccattccacgcttgatctttccatcttttttgtctagcagatcgtccagcggtgactgctgcactagctcccacgggttcttgactggagcggaagaacttggttgttgacggatcgggaccgtctgttgcttggggatcggagctccattgagtcggtgttctgtggtggtagatgtgttgccgttcgaggctctatcctgctgtgcctgttcctggtacccaataaagagcttatcgccatgccttcaatccagcggcgcgtgagtaattcaacatgtagatgtaaatatgaaactcaacacttacttgaggccaacctgctgaagcgaaacccctcgtaggtcttccagtagtctttcctcaccacctgtgccgatcggtttattcgagagggcaatggacgaagcttcgacgttgtccgggaggtgttctagaatctaatgccgattgccagattagattttggctctcatcctgctatcgttcccttccaactaagagccgataaatacctttttctgaagtgacgggaagagttcctgcgggctgaccgtgagtcgaaattgtccgtttcgactctcaaatcggagaagaatggaggccatcctaagcaaaactatagcacggttgaggatgaggattgagaggtagtggcgtcaccttccaaggaacacaagtggaagaaatattcgaagacaaagaaggcacatgcaagtgagaagagaagctcgacttaaagcttccttggtcacgtcacaactggcgggcggtatggtacctggctgacagaacaccccgcggtcggctttggagttttgggggaggcgtcggtaaattcgttaccacggatacagagccttgaaatagagagccagaacctggacagtacttataaatactttcaaatggaagtgataacacagaactgcctcttgtagcatcggtaccagaggcaaatttggaaaatgtgagcaaatgactgtaggaggcagaaatgtgccctgagggtactaatcgtggaatgtaactatacatggatatatcaagttgagcatctacgttacaataggctcttgcaaaagcaattgagtaatcttcttccatatatttcttccattggctagaaataattggctgttgaaaatgagaatggtatgtccgtatcatcataagatataaaaaaggcgtaaggaacgccccagtgagaacagtctagaattagagaacgcaagaagagacatgggcccaatcacaaaattgtacagttcttaggcaaaccgcatggcccctcattgctcttcttcttcttgactagctcctgagtatccttgaaaggctgctcggtctttggagcggcctccccagcaacaggagtcgagctctccggctttgactcggtactgccatgcattcactggaccttagaaacagtctcgtagaaggccttgccctgggcggtggcaatctcgagctcaagcgcggagggcttacgggaaccgtcggcagcctgtagacgggatggtcagtgagagaaatgcatcggggagtgtcgttataacttacagcgaaggtaccagcaccccaggcgctaccgccgtgaacctcgtccaagttgctgagctgggcgaatacggtcttgtagcccagaggaacgtagatgaagccgtggtgagcgagagtgctcatcgaggcaagggcagtcgactcttgaccaccaccctgagtaccggtcgacacgaagagaccggcgtacttgccccagaagccaccagtggcccaaatgccaccggtcttgtcccagaaggtcttccactgagccgggaagttaccgtaacgggtagggataccgaacagaacagcgtcgaaggcgaggaggtcagagggctcaacaatgggatagctagccttggtaggagcatgcatcttggccaaaacttcctcgttgagggtctcagcgatcctagagattcaattgttaattaactgactcgaggggcaacaatgatagcatgactgactggaagatctcggcttgaccaccagcggactcgatgcccttcttctcagcctcggccagggcctggatgtggccgtacatggagtactgatcggaaaattagtgagatgggagaggaatgcattgccattggaagacatacatagacgattgcaaccttgggagccattatgacggtttgaggattgtagaatgaacgttgtagagggaaagttgagaaaggaagagcggggaggggaggtaattatgaaggttaacaccctgtcgaggggaatatcctaggtacatcatccaccatattaattaataggcagtttatgtacctctatgattagcgagcgcaacgaagctttgcaacaagttatcagtcatcgatgacagagcaaaatggaacatgattggctgatcaggttccactcggatatagctctggccttagtgattcttactgagaactgacaaatgaagatttacgtgccgagggtgtataactatgcgtagtagagttacgaatctattagtaaaaatgatactccgcaagcgtgcagcttctaccgcagaggggggttgttttagtcaacggaattattaacactaactaatagttcggtctgtctagacagtgcctatcatgatgtcatgtaactaatcgcttctgtgtttaactctatattttggcgtacagagacgtacttgggtccgatggctaaatattaccaccacaaggaatttgggttcacgacactacgggtctatcattgctgcgaaaccagtgtggaatgttcacaccaattatgccattgagctcaagtgaaaagaatgaatttctcgcggatatttttgcgtcagattattcaatagggtatcgcgggactggcgcaagaactcataaatgaaaataaacccaagcagtccgtagaccccttgccgaagccacacctcactccatgccatgcaatgtcaccaaaaaaccccccttgcgataaaaatccatctaacctcttccacgcccgcggaagcggccacgcccaaatccaccgccccgaccacgttcatttcgccattctcgttcccgttctttttcccgttcttgttcttcacggatgagaactcgttcatgctcaagttcttcctctgtcttttcagtacgcattgtaggccgtggtagattttccggccagcgagggtgggcatcggcacacgctttcccatcagggcagaacccggccagatagaatgtacatagacgtcggcggacgtgtcgctttgcacataatggtcccaattcgcaatatccacggtcgtagtgttcgcaaggcggcagtcgtgcctcctctcgaacatgctgataaaggcaatcgtcaccattggtacagtatccagatcgagaaaatgactggcattctggcattcgtcggaggttatattcgtggaggtattcgcatttcagtcctttcttacagagtcccttgaggaaatgtttgcaaaccagcgatccgtgtgttgtagatggcgccattccggaggctgtggtagtcgaggttgtcacacgggacggagtgggatgccgatctggacaggcaggtcctaatggacagtgtccttcactataggctttgcaaacaggtacatcgctggcgagtccgaagccgaagctcttgcgcagaaagggtgtgaaagaaaagtcattgtagctgggatcgcgcgtcggctcggcggataggatttgcgcagctgcgctttcagtttcggcagccatggctcgatgaagatcgagggaagtgttgagattgaagagatgatcagtggtagtcgcgactcgcgagtcaggtgcgtgtattcgattgactatgcccacccgtgtagatgaaattgaacgttcggagggagagtataaatcacagatcctcggggtatctcgctcaaataggcatggagaaggagaatttgaggaagaaggcttagttgttgaaggttgcagagctgtctaggttgttctccagttatcgccttgaaaatcaggtggcgactcggtgtttggctcgtttgcatctcgacatgcgatattcaacaacatcgaaatcatacttattggaaaaggattatgatcagtacatcaataccctcgagtctcgtgctatttgtcttttgactatatacggcaatacactaaaggggggacaaggacgatagaaacagagtgaagattgaaaactatccaatccaatttatttgacagtgaggctgcaactgatatttcgaactatttttattgtcttacccagaatctggatatgtagtatctgtgcacaatgcatacaatctcagggtctgtcgttttcccggctagcaggccgacaatcttttctccgagctttatttgggacattataatatttaacgtatccgagatagttaactagttagttagttagttatgtaaagttgattacatatatccgtttaggattcagtttcagcaagttaatctcacatggctcccttaaattaccttcctagtattaaatagtcccgagactatcgcggctattaaaaaagaacaaatggccaagttaatcaccaggttgcctattctggattttctatgagcttgttgatcatcttcattgcaatgagcgcattcggccatttgaaaatattacttttatctttctcgtaatagccctgtgtatacttcaagatgatttgagacttttctcgtgcaatgtccctagtgaaacggaagcattccagcctcgatcaccgcggggaagtataaagccggggccacatgcatccctccccatgccctagcctcatccttcagactatcccagcgaatcagatacccctgtacccctgtaaacgctgtgattatcaaatcgaaaaagcaaaagttaactagcaaaaggccaaacctacgtcgccccatctccttgttctggttattggcttcgcaacaaaacccctttcaccggggtacccagcacaagctagattcgtattttcacgagtcatgatcgtccacaataatatattgttcatgacgatctgccgtcattgcaaaaactctcgaacacggggtggagtgcattgcctcatgcaggcgatccacgcttgtaccttagtatgaaaatctctttgacaggattttcttgcgtccgctggttagatcggaccgcaggtcatacggacatgaccggacacaatcctcccccatgtgtcttggatctaggacaattcatgactgaactccgagacagaaaccccgcatctgaccatgcaggcatccattgtgtacaagttgacaacgtacttctgtttggaaaatgctgcgcatatgcttagcccacattctccacatctttctgtgtccaattgctgattcggccatctatatggagcctagtcgggttacctgagatttgcatctgcaaactgcctgattatacacttcacctaattagtgcaagtgcaatagagagagtacgaaaaggaacgaggcgaggttccacgtgacgtattcccaaaagggaaacacacagcattgttctggggcccttttcaacttgcaattcaattctttctcttcttttctttttcgttggccttttttggaattccattcagcttcagtgctttgtgtgattccccccaatgcgcgagctctcacacttctcacctcgacgtcttgaaaatgttctcagcttccaggctcttccgccgacggggcgcggatcgtgaccccgctgccgagtcccacgtctcatacgaagtgccactgtacacaaatgcagcctactatccgaattggagaatctatcgaaaggaacctccttcatctttgcgcttgggatttatctcacatgtgttctacgcatttgcctggtaaacacagccaatcaccgccattcaagagtccgggttcgagcagatggctgacgcgctaatctcaaattggtttcttgcagggtgaaagatgacggaactgtctatgtaagttttaagttttaatcacgcacctcctctaatgtgggaatatttactgacgctgcgtcatagctgagcgatgagtgggctgatacccagatgcccgttgacggcgcagaaggttgccttagagctttcgtccaattgaagcaacagtactctaagatgagggtcatcctctctgttggtggtggcggaaaaggcagtgagaacttcgccgctgtagccagcagccattctcgggtggacactttcgttcgcaccgcgcgggaactggtggatcaatttggaattgatggaattgacagtaaggccgcgtatctttttgatgctgagacaagtcggatgtacatgactaactccatctgctatgcagtcgactgggagcacccctctgattccaagcaaggaaaggattatgttcgtctcctcgcacgtctgcgggaagtgctacccgctccgcgttacgtccttaccaccgccctccctgccggccagtgggcattgcggaacattgaccttgctgccgcacaaaaacatcttgacatgatcaacctcatgacgtacgatttcgcgggaccatgggaatccgagacgggccatcaggcgcagctttatggctcaggcatatctggtgattcggcggtttcttatgttatagggcaaggagtgccccctagaaagatcattttgggtgtcccagtttatggacgatccttcctgggcagcaacggtcctggtcagcggtatactggacacggtggcgaagatggtgtttttgactatcgcgacctaccccgaccggggacacaggagtattatgataggaacatcggtgcgtcattctgtgttggagctgatggcggtttcgtcacatacgataccccagaaacagtaaaacagaaggcggaatttgtgacctcgtcgaaactgggtggcctgttttactggcatgtctgctccgatgcccgaggaccgcgtagcttggttgagacgggatacaacacgatgcacgagatgtgagggctttcggctctttgcaaaagcaactaaatcaaaaatcagaatctcccatggcgcgctgacatcctcaaaaatggtataggtagctgtcattattttaacaattgtctcccaggttcttggttacccctagtccatgactatataggcttctagtaggaacggtaaatatagaaaatatcatgtttcagggtataaggtgaatcgtgatacggcgcttttgcgggcagatttagtactttcactttcattagacaaccgacagccgaggtttacgcagtcctataccccagggggccaaacctccatttttagcaaatactgatacattaatgcctggtttgggccgtctccttgaggatagggagaagacatcttagaaaagacacctagaaagacatccaaagaggctatcaagaatactaactaaatttggttagtcgaggctattcttgcaatagtaatacaggtattttgattcttctaccgatcccaattcagatttctaggcctaaatcaaatatcaaggtatgacatctataggactgcgtagccgaggttcatcttccccgcattttcaactgctttatcaaactcactctgcacattctatctgtcatttccccgtcgtattcacttataagaatctcactatgtcctactcgcagcccgcgacagcagatagcggctacatcaccgaccccggcccattggagaatacctacacgtcggatcccagcctccaacggacactggcatgtgagtttttcattcatatgtaattataataataatttctaaacataatccagggtacctatcatccgctgtatttcaatctgtacaaccgcatctcactcagttcggtgccgaggctatttcagaacaggttcgcgaatggagcgccgatgctgagcgcaatgtgccatatgtgaagagccataatgtctggggtaagcgatatgatcatgatcgattggtaaccacggaaggctggaagcaactgggcaaatggggtgctcggaataggtgtgatctataaatcgtatatgacatgcatgatctaacttgatccgattaggatcgtctcggcgggctatgataagggcttaggggtcgatcggcgaacagttcagtatgcgctgtgggtatttccttgtcgatctttctatgctatcgctaatgccatgattccagtacctatttgtactctccttcttctggactctactcctgtccgattagcatgaccgatggtgctgcttttattctctcatcgaaaattgacacgctgccatccacgcatcctttccatgctgcgttccaggggctgatctccgaaaaggatgatcactggacttcgggccagtggatgactgagagagccggtggcagcgacgtccaaaacaccgaaacatgggctacctactcgccgctagctactccttccggctcctccggctccgacctccttggtgatggcgactacctcattagcggattcaagttcttctcttcggcaacggatgccaaccttgctcttttgctcgcgaagactccatctggaaagctaagcacgttcctcgcgccattgcgacggaccgtggtagatacaaacggtgtctctaaagttgtatctaatggcgtcaagatccaccgactaaagaacaaactcggtactaaagaattgccgaccgccgaattggaactaaaggatatgcgtgcgcatcttcttggggagctagaccaggggattgtaacgatcgcgcctcttctcaacgtcacccggcttcatacctttgttggttcgcttgctggttggcgccgagcaatgagcatcacaaagagctttgcaaaagcgagaaccactgtcggcgaaccgctctggctgatcccaatgcatttacgactcttggcggacttggaagtaaagcatcggggtgcaatgaaccttgcgtggttgacggtcgctttgtttggaattgttgaagatcaaaaaccgtcgtctaataagctcgcgcatctccctcaacctggcaaggaagcagaggtggttttccgtaccttgactgccactgctaaggccgttatcagtaagatggccactacgggaattcaagaatgtcaggaatctatgggtggagtcggctatatggacgaggctgacgagcccgagttcaacatctctcggattatgcgcaataacgcagtcaattctatctgggagggtaccacgaacgtgctagccagcgagtttgtccgcttccttatcaagaatgacaacctgaagatatttggaacatggcttaggcgtaccttggccctgattcagagcgcaaatctgcagaatgccctgacagctgcgtggtcagctttgcgtgctcgttttacggctcaagatcccgcctcaactgttgctgatggccgtcgctttatgttcactctggcttggattctatctggtgctcttctggcgcttgatgctgaacgtgataatgaccttgtgacgacagagattgctcgacgctggatcttgagtgctgagggtggcgtgggagagcaggtgttccacgacattgttatagttaggagcactgctagcactatctctgaaggggaggaacatctgcaatgggactgtcgtattgcctggggagttgacctgccggcgaaccgtgcctctggtcatcgatccttgcaaaaggcaagctcgaagctttgaatcatgaaggttgatgccatatatagcacgcaatcttagctggcatttttgacgtttggatttctagctgatattggatcattctacatatgtgaacacgcaatcaacactttgcctgaagactagtagttttcattctttattttggtgaataatgacggatggggggaaaagacgtgctacaaatagaagcatacaagcacgagaatacctagttcgcaagccagctcctgttgatcaggcaagttgaacaataatctactaaatgaagcttccgcttagtactatattccttcagcttcgtgcggggactaggcgtcacatcagccgagtagcagcatcaaccctatgagatgcaccatgcatcgccgatataaccgacttcgaccgatttccaccgacaatcaccgaaagaagctatagtatcatgggtgtctctaggaatgcgtcagatttacccgaacgagacatttcatgcgggggttcaaaagccgggtgccgacgggctattggtgtgattatcgagattatctgctactataaatcactttataagcaatcccaattctacgtcttcaaaatcaaaaatcaacaattgacaccaccacagaaacagacaagaaatggcaagccctacgaagagcgagtcgagcgacgctctcaggcctcgtcccatctgggaacctaccatcccgcaagaccaaatacccatgaatatctatcgtgcgcatatcaacaagaagttcaatcagcagcttcgctcttctcatgatctgcatcaatggtccgttgagaatctgcaagatttctggacagacctccatggctatacgggaattattccaccattgcctccgacagtaacatccgcatttgatcctagcacgccaatggacaaggtacccaaattcttccacggagcaactgtcaactatgcggagaatgttgtgtctggtcgggacttggacaagacggctcttgttggagttcgagagggccatgatctgagtggggaggtgtggacatggggagtgttgagggagaatgtcagaaaggcaaggagtgctttgctcaagctcggtgttaaagaacaagatagggttgctgctgtcatctcgaatagcgtctggtcggtcggtttgttcctggcgactgcgagtatcggcgcgatttggactagtattgcaccggatttgggtgaagaggtatgtctcgcaggaatgggaattgctgtcgacatcggagactgattagaaatactagggctgtgtgtcacggttacaacaagtcactccacgggttctcttcgcagatgccgaatccacatataaggggaaaatgcgatcgaacgtcgtcaagatcaaaagcatcgtgaaggcattgcactcaaagccacaggtgtttttgattcctatcatcggcgcccatgagtcggcattccccagtctcgatcgcttcttgtcaatgtcacggcgagaggacaggctagggttcaaaagagtgtccttctctcatccactctatatcctatacaccagcggcaccaccggtcagccaaagtgcctggtgcacagccatggcgttattttgcagcacaagaagacatccgtactgcacaactctttgacatccgaggatgttgttttccagtatagtagtacctcatgggtcttgtggaatgtcatggtcggtcacctctccgtaggtccgactctgattctgtacgacggatctccgttatggcccagtgccaaaggactggcaaagattgcggggtaccataaggtctcatactggggttgctcccctcgctatgtacaggagctcgagatgaccggttgtatcccaaagaacgaattcgatctatcctccctcagaatggtgcagacaggtggctctcatctgggtgaagaccaataccactggttctaccgcacattcccttccagtgttcatctcaccagtgtaacaggcgccacggacctggcgacttcttggattggaactgaccctgcaggtccactgtatcctggggagatccagcttcctatgcttgggcacgacttggacattgctcatcctctcacgggagcttctatcaagaacactggaagacatggcgagttcgtctgtcgcaaaccatttccatcaatgccagtctttttctggggcgatgaagatggatcgaaatacaagagcgcctatttcgagaaatttgagaattgttgggctcaacacgattgggcgagttataacccgcaaacaaaaggttggcagattcatggaaggaggtacgttttatttctctgtcggaataaatttggggaaagtgcgtgctgactgggaaaccgacagcgatggtgtccttaatccacagggtattcgttttgggtcttcagatatatactcgatcaccgaatcagctcctttcaactcggtcatttcaaccactttctgtgtcgggcgtcgacgatctcacgactctgatgaagttgtgtttttgtttgtcgtgatgcagtctggaaagccgttcacgggccaacttgctgtagagctcaaggatgcaattcgcaaaggcttgagcagtaagcatgttcctcgcttcgtgatcgaggtcaaagaagtccctatgacggtcaatggtaaaaaggtggagacattgataaagcaggtcatttcatctggccagcttcctaagattattagcagcaccgttgcgaatcctaggtctctagatcacttcaggcagtattatgatcttgaggtccaaaacaacaacagaagcaagctatagacgacatgctgtctagcctatacaatagacaatgggtggtattttgaaagagaaatgagaaaggaacttttgtacatgaaaagaaaacaagacatacaccgagaccgatttatgtatcgccaattctcgagctttgtcaagttcatatattgagtagccaggagccactccagtcaaatccagacccttcccaattattgctgaatgggtccaagccaacatcaacagaggcaaagtcgtaagtatccacaggttgtcccggcggagcgtcaagggaccgaagggcatcattgggggtttgaatatccgccatagtgcaggtaggcgagatgtccgcatccccacttggggactctgaggagtgtccaatgatttgccattgtttgcaaagttttgtatcgaatccctcaaagaaagaggctgcgtccaggtcgagagtaggcgatacacccccaaagggacccagctctcggactttctcggtcaagttgttcagtgcacgcaatggtccgaccgccgagagccacctttcggatagcttttgaagggagagcttcatgactgttaattcatgttcggcagtattctgcaggtgggtatagcgacagctagaaaggagtgacagtccagcacatagtggatagaaagcaaagacagggcccaggtatcgaagctcatcgcgaagcaggaattcctcgtaaattccagcaataaacgaagatgctaccagcgatgctgcgggtggaacgctgcctggcgtaggcgagcgatggagaatagtgagcactacgaaatacatgaccagcacttgttggatttcgaaattgcaagtaaccgcattgtcttgaggtgtcacacatgatcgtaatcttggaatgacttgttttgcccatcggtagacggcgttctcgagatcgacctgcctttggcgggagatttcttgtcgtagatgggactcgaccgtgtctcccagaagccgggatatcgtgcagtaggctaggaatagttgtgatttgaagttgttcacggggaaatcattaagtgatggcggaaggacatcgctgtcgcgtagattgatagttcgtggtcggccgacgccaacagaaattatgttgtctcgtacctaagtatgttagcccatattattccatgtgttgcagattcagggggagacacctacaacgagagaccaccacagccttctccggagaccccgatctcgggaatttggcgagggctccttgtgtagcccaatctgaaacgccattgctccagctgttcgaatccaaaacccactggtatcggtagaaacatcctcgggcccaaccggattgtaccaatgcagtaggcaggctgccacaatagaaatcaaagggtcgtcacaaccaccaaaaaagaaaagtagttttgctcgtcgatagaacacttcgctggacccatagtcgagatgagctttggaaactctacttccagcgaggaagacagactggagaagcagcattgatcgcggcgcactctcatccagccatttcgggtccacaaccggtgtccaggatgcacagtgcatgttaaagctggccattagttctgtttggactgagactggaggtaactcaaaagcaccctgattgcggagcattttcaagtcagttgctgatgctttggggctggtgtatgtggtttcgcgaccaggtttgaccatattttcatcaaacgggacgctgccgccgatatattcactgcggccgcgatagctctcctctttaataaaaggctcgccattattagcgatcacggctgtattggtttcaattggaattgcctcatgagactcgctcaaataattccgctgtgaagctacttgtgcctccggtgactcgggaggaacctgtgagctccgtggtgtctgactcaagggagcagacgttgacacattccgccctggtgataggctgttggtgaacctcttgcgctttcttgtatatggtctgaaggaagtcaattattttgattattcgacttcttttgaccgggtctacttacctgcactccacatccgactttttgcagttggtgcaggggtcgtgcgtcgcaaagtcgcacctcacctataaccgttagcaattattcgggaatagcccaatagatgatcaatgacacacctttctcttatggcatattatacatgctgtagacatggcgctattaccgacagcgtagatccggatgacgatgatggttggaggtcgagggcggggtttagccgaggcatggaaggtctataaaatgctcaacagcaacatttctgtctttttttcccactaaaagtcccctgtttttagacatggcggaacccggcagagttacaacagatacttcctcgtatcctggcatctcggtggtggcaatcaatcgccctgataggaagaatgccgtcgaccccttgacagcgaaggcgctttacgaagccattcttctttttgaaaatgacgcgaaacaaaaagtatgtgtcctaacgggtgccggcggtagcttttgtgcaggagccgacctccatatggttgcacaggcaaacaacgacacaccgagcgacaacctccaacctgtcaacggtcgcaacttagggccaatgggtccctccagactcattataaaaaaaccagtcatatgcgctgtctctggatatgccgttgcaggaggcctagagctgagcctactcgcggatatgcgtgtcgttgaagaagacgcagtcttcggggtcttttgtcgacgctggggtgttcctctaattgatggaggaaccgtccggctgcaagccattgtcgggcttggtcgtgccttggatatgatattgaccggtcgggctgtgagcgcccaggaagcgctgaccatgggactggccagccgggtggttcctaaaggagaatcattaaaagaagctattgggatagcaagacagctcatcacattccctgagttgtgtctcaacacagatcgccattcttgctactacagtgcgtatgaggcatcctcgttccaggatgcgatgacccaggagttcaatgcagggagcaaggtgatttcacaggaagccatagcaggtgcagcgaagttcagcaaaggattagggcggcatggcagcttcaaggatcacagcaagctgtgaagagaaagaggcttccattgaacgttgaaatagttcacattatcaaattaatattttggatatctaaaaccaattatcactggtggcggcagtgatgtgagagcttattatgctaatacaagctagacatgtatgttcagaaatatgccgtattgcgcgaatatagagggactgcacgacgaagtccctagttgattttcttttcggtttcgctcaagtcctccgaggtgaatttgacacgcttgccgtaaaccaatggagtacgagaaagcaaggagccaatggcatatccgatgtaggctccaacaagaatcgtaattgggaatgcctgccaaggtcggtcccttcatataccgagttagccaggtattccgcatttgaagtgcagtatgaacgtatacataccagtcaagaggaataggaatagcgccaaaccacgcccccaagcctgtaccgagcgcactgccccagaccgcatcagcgggtcgggcaatgccccaaacctcgttccatacgccgcggtccaacccgtgggcgtagatcagggccgtcgcggatagaacggccatgtgggccgcacacaggatggtctcggaattgtgggttgtgagcggggcgccgaatagaaccaggaggattgtcagaaccggggtggccaagacgaaggtcagggagaccgagaggagggccggctagaaaatcgtgttagtatcaatcacacgcaggttccgcttaattggagagatatcgcgtaccagtgaccgagaccaaatgcatgcccagctattggcgtgctgcttccgctttccatgtttgccatgtcgcgcggcaccaccaggcccagatggccgaggacttgacttcacatcagtcggggcggacgcgctcgtctctgttgatgtcgacccagcgggcggaagacatacaatcacgtagaagatttgtataagggtgagccatggtagggtggaaagaagctccttagtaggattagccaccaatgcttcgaaacgagtggcacccaatgccaaaaggagtgccggatgcgcaattgagtagatccgggctatcaacgaggggaggatgttgacgggaggggcggaaggtttctcgacgagcgtctggggtgttgaggaaggagcccctagcgcggaagaggtgtcttggggcattgctgggttcaactggcagttctctgtggaaaacagaccttgagaagctcccggttgattcagggtggaaatcggagggtcttgaatggagatgacagctcgatagtgattggctgtggccttgatgtcttaggcagaacatatatcttgccttgcccttcaggcaacaacttcatttccgagttcacaaatggattgtactacggagtaatatataactatgcagtccatgggattgtagcggccctcattacaagctcatggctgacatattattcgttgggcttcttatcattgtgaaaatgtatacagctgtctcgcattgtgttcttctcttttatctccagtataacaacatgctagcaagccagaaagacaagtcgcctacctacaaaaccgcctccagtctcagaggaaacaaagctgcactcatgaagtcgccccactttctatctcaccgattggactaacatggtgagctatcgatgggtgttgtacttttgagtatgaacatggttgcactgtgtctacctaaatgcatccagcaagtatatataagcgccccagatagatccgattaagaacacacaagaaaggcaattgcttcgttctcgatgaattttgagccgataaataccatcgggattggatataacctgacgaattcttcaggatttctccggcgcggcacttcggccgcagacacactacagctatgcagaagtgcgaaataattgaaaagcaacatccctatttttgtcatcgggttcataacagtataacagaccgatatcgcaagttcaacctaagaataggacgagatcgaaaaaaaaaaaacaagaaaagagaccaagacagaccggctgcaattgcagagacagacatacattcattccacatggcaacgtgatcaactgaaatccggaaacgggctaataatatgaaaagagcttcggaccattgcaggaaggcgggggtaggtgagagcaatgggataaagaatacatgagggtcgttcaaagggaacttgggttggcaccacaccacccaatcgagagcaagggggatggaagtgcaagagggtcacgaatacgagggcaaagcccattcatcacaaacgaagataaaagacgagaaaacaatatcatccaacgcctcgggcgtcaatgctccgtgaataagccatacccttttaaatggtcaaacaaaacccgcacaactggataaaagatagaggtgcaagccgtggaagagcaatcatgaaagcagtcatgaaaatgatgggagcgaggagtggaaacactgtgcgagagcactttgaagtagatcaagcagccgaagtggacggtcctgcgatctcttccaagatctcattagacaatggtggctctggtgcggacacggactcggtagctggcagctgagcggaccccttctgttcaatgacaggtacagacgcagatgctgcggggctatgcggctcttcgggaatagatggaggaagaccagcgccaggcaatggagacacaggcgaacgtatatgctcttccttgggctgttcacgtgggacttcgaccgaggcatgattgccatttgtcgactccgtagcatttggagaaagaggtcggttggtgagggacggctcgttctctgaccgggtggggctttttgtgcgctcgcgatcatccttaacaccatcccgaacttgagcaactttcgccttgaactttccaaacaggctctttttctcgggctctgatcctgcggaagaggtgccttgaacgccagcatccaagctcaatgggtggttggagaggtcagtgctttgatattgaccgctgccgattgaagtggtgctttgctcggctcgaggatttgttgctcctaggggtggagacgcgaaacctagtccaagttgctcgctggtgcgcttcggagaccgatgaaatcgccaacttcgacgattttcatggcgagtgacatcatcgggctgatccatatcggactgatcagtaaaagatgagcgtgagttcatagagggcgtacgcgacttgttaggtcgcagagagtggtcagtgtgatgttgcaaagtaccctctacgagagccgagttcgagtcaaaggggttctcccggttgccgagtgtcgcagcatttggaggtttcggagtggtgtcaccaacagcagcttccacggaccggttttcgtgtttaggttcaagatccgcactgtgagctggagtcgaggcatggagtgaattagtcgagctttgtgcgctcatgcttgcgctaccgggaatgcgcttcttcttcaagcgattcggctgccgatgttctctcagttcatagtcaggtggcggtgacttcgtgaagaaacttgaaagcttacgctcacgactcggagtgacaacctgtgggggtaaagtgaccgggggtgagacgaccgtgttgagattatcatgtggcctggtagtttcgttgatgacaagacgttcagcagttgccaggggcaatgggccatgggttgacgtgtgcacatatacgttgcctggagtcaatgatgcggttgattgactagggatgcgctgctcaggacgctgctcggaggtctgttcagggactggccgaggaaccggatgagatacagactcagggatcggctcaggctgctcaggctcttcgcgcactgatggcgttcgactattcgatcgagaactttgatgagaaacagagaggccggaagggttgttcgagccagtgtcattggctcgtgcataacgagcagaggtcaaaacggggcccatctttgagggtagggtgttgcttcggtgcacaccaccgccaccaccgccagtgattgaggtgggagttacagggctttgagtgttgttagaatggcgggagttgcgcgacgaaacggagacatttcgacggatactgtccaacttgcgatggctttccgtgttcgcactagcgttggataccgatcgtcgaacggtggggtgaggtcgtgcaatccctgcctcaacctccttcacagtctgctcatcggcagccgtgccgctcattccgaacaggaagtggtcctggttctcaatcaagaagatcaacacatcctgacttaacttgtattcctccggcgacatatcatgctgcgggtgggacagcatgcctggttggaagatcgcggacagattagctgacggcatgcgattctgatcggactttgaggcgaaaaccgcgagaagatcgaggatatagaggaggagctgcttgttcaatgggggcagctcgatgatgaggttctggtatgtcgaaacagcctttgcgtggtcgaacttatcggcgtcggttgtgttcttgccttctaggacctgtcgttggtagatccgcagaggttcacggaagcgctcataaaactccaatggtacgatgggttcggggagctggttcaggtatcggcgaagtacgtttgctgcatcgtggacggtgtatccggaccaatcgagtcctttgccatatcgctcgggggaatcaaagacctcctggaggtccttaatacgcttggctgatccgttaagacgaaaaatgccttccacatccgttgctatccaaaaacgtcagcgttaactcatcgagtacagcaaggtaaatgcgaacctttttcttttagaaacactccacactttgcaacaacaatcggcacgtatccataaatgaagctctcgccgtggtcgttggtcaaggagattgccacattggcatacttgatgctgacattgagcgcaatcccgaagatgccgcggggtgcctcctctgcgataaacgggtcagcgtaccagttcaagaaacgataaagaacctaaacaaatcaattggaaagcgagcaaagtccccagctccgacatgttgaactgcaacaaccatctcctgtgcgacgaggggagtataccccgaggctcagggggattgcgaaccgccgcgagccggagtagctcaggaaatatttacgcgattgcctgtattctgatatcgcattcacctgatatggcttacctttcaattcatcttttctggtgctccgtttgaactgcttccaccatgaagctaaatctcgctttgatggtggggagttggcgctgaccggatcgggtgaggtggggagagggtgaacggggtcagcacccgggtgcgacttgccgaccgtcaccatggcgagtccggaggacgactcgagatagaagcgaagatactgggaagcgaaaaagcgcaaagaggtgggtgtgtcgatcgagggattcgggaaagttgaaggggccctgcgtcaccgccctcgtgtgggaaatcctggggctgggcccaaaatagcacaggcacgttaccgaggcgaagcagaacagagatgggatttgagaataagaacctgagaacaaaggagttgagaagaaaagtaataggggatgtgagtatgtaagtctgatggatgaagggatgcgaaagggctaagaggtcagggtttcgaaagggtcaatgggggggcacgagccaagagccgaacacatatgacagagtttattctctgtattttaatgacagggacttactgatcagggggattttcattctttttgcgaacataagactatgaatagcacaatctaaccaaggttcccgggacaagttaaagatgggtcagggtcacctgtcatatagaattggatcattgtatggagtgcaggtacgcaatattctagggatttggaattctctgtcatttgctacatagaaacaccccgatggagtaaaatacagatctcccaatactagcttattgtagaatttctagaatttctagaattacgagcataaatgtgaagagccggccccgcctgcgagtagtctggaaccaacgggtcttggattgtctggaacgtgtctggaccctttcaggaataattttactggagatcagtcgcttatatcgggtttcatattttccggaccaggtaccgattttcatttttttctagtttttcaactcgcttgaccttttgagttagcgtgaccaataaagtcgacggagtatacatttagagcatatccattgtcacttgatctatggaaatggtggcttaggtacagggtacgaggcatcatatttacccttgggtctgtgcattatttccatcctatttttcagagatcgtttcagaatgcatgctctaggtacatgtagtttttgatatcttatacgtcatctggatcaccgaaaagtgtaaataacacgattaaaccagataatctttccggcctttggttgtatctttctatctatggctcaccccttggactagtcataagtcattgaggtgggattggctgtccatagcgtcatgaagtgaggttggaatatcggtgacgttgagatatcacgtggactgtaacatcgaggtttttggcatatttatccgatcggagaaactatcctgcgggacagtaggtagaaccgtagagctaacaaagcatcatgacaatacaccgatctagctggtacaatttctatgaagattgatctcccacaggcctggattttaggtaaactgtaaaattgctgaagtgaaggccctatgggctagacaactaccaagagaggagatgttgattaattgatggcctagtagctaaggcataacattttgagtcgcgtgggctattatttatccggcacccgagaagctcagaaccagcggagctgacagctaacagaatgacttgttgaaagcatcttaccatcaaaacatcttgatcttattcatctatcacaatggaagggtaagtacaccctttgaaccctctttaatttttttgctatgttttctatcccattgttcctgagggtcatcctatgagcaagccactaatactcaagtcacagacttaacgcagcggaacagcgcgagttcgcctcccgcatggagcggaagcagatgaaggagttcatgactgtatgtatctcctagcttcattgttcaagattcaagttcttattcctctgcccatgttcctccttgccatcaaccacctgtgttctcccacgctcaagatctaacatcttctctttcagatgtactccaagatggtccagcgctgctttgatgactgtgtcaacgacttcaccaccaagtccctcatcaaccgcgaggagacctgcatcatgcgctgtgtcgacaagaacctcaagagctccgcccggttgaacgagcgcttccaggagcagaatgctgccatgatgcagagcggctccatgggaggaaactaagagtctattttgataataagaaacatattgtcgatgactattctttatttttggcaacatgcattcgacaaattgggtggttggcgatgcggctcgatcgacccggttgtctccggcccgacagtggctttatctggaggtttagagggatgataacatggtcgatgacctgttggcggggaagcgaacaagatctgctcctttccgtgtacaatagtgattagcacgggagatatctaactctcctctcccggggctcaaaatacaaaagacttgaccaaataagggaaatgagatgtacgtgaccgggctcgcaaatcagagctcagcttggattatatttgtcttctcaaactcgagatagatcctttgttgctatcaaagcaatgcaatttaggcttgtgaagcccgagggtgcgtattttcttgtttattcattttccttggcgtacacattcgatgttccagtaaaactccgattccatgctataaaccgcgttgccggatggtgaataccactattctgcgactaatgcggtcggagtcgtaccgtgagaggtaatactattatatacgtatagtgcatccggacatacagggtaggatgtatacaccttccttttcccgcggagctcgggagcattcccgatcacgcgtttttctattcggaaatgccttatcgtactgcatttccccaagtgaggagaaacatatgaggggacttggaagctgtccggatctccaacttctcaaatatttgatgctttatctttcccctcattcccggatccaccccccactccttcaaaagcccgtcatttcctcttctcttcttccaccaccgtcgtattcttgatgtgagtcctttttttcccccttggcattcctgtaattgctaacagtattcgcgttagaaatcaataagcacaatggccagtacagtaggaaaggtaaattactttttccttcttctttttaactgaataaccttgctaactcggaaatctacagacaatcacttgcaaggtaagctcgatccgaccgccccgcatatatgacgtcgaccagcacagctcgaatctgtgagtcatgaatattgctgaacaaattgacaggctgccatcgcctgggaagccggtgcgcctctgtccgttgaggatatcgaggtcgctccccccaaggctggtgaggtgcgcattaaaatccaccacactggtgtctgccataccggtaagccccgccatcaaccccgccctataaaataaattgccgaaaaaaatccgatctatcagagccatgattattgacatccctcagatgcctacactctctccggcaaggacccagagggtgctttccccgttgttctcggtcatgagggcgccggtattgtcgagtctattggcgagggtgtgacctccgtcaaggtgggcgactacgttgtcgctctctagtacgttttcggctccgatctcggcgttacggtccactgacaattgtagcacccctgaatgccgcgagtgcaagttctgcaagtctggcaagacgaacctctgtggtaaaatccgtgctacccagggtaagggtgttatgccggatggtacctcccgtttcaaggcccgcggcaaggacctcctgcacttcatgggcacctccaccttctcccagtacaccgtcgtggccgatatctcggtcgtcgcggtcactcctaagatccctactgatcggtcctgtctgctcggctgcggtatcaccaccggttacggtgctgctgtcgtgactgccaaggtcgaggagggctgcaatgtcgctgtcttcggtgtcggctgtgttggtctgtcggttgtgcagggtgcggtcaagaacaaggccggtatgatcattgctgttgatgtcaatgatggaaaagaggcctgggctcgcaagttcggcgctacccacttcgttaaccccactaagctctccggcaagaccattcaggagcacctgattgagatgactgatggtggctgtgattataccttcgactgtactggtaacgtcggggtcatgcgcgctgctctcgaggcctgccacaagggctggggtgagagcattatcatcggtgttgctgctgctggtcaggagatctccactcggcgtaagttcccccccgctattcttcaccccccagtgtatattctcctggtctaacacatgccacagcattccaactcgtcacaggccgtgtctggaggggatgtgcctttggtggtatcaagggtcgtacacaactgcccggtctcgtcgacgactacctcaacggcgagctcaaggtggacgagttcatcactcaccgccaatcattggatggtattaacgccgctttcgatcagatgaaggagggtgactgtgtccgttgcgtcgtcgacatgcaataaggacaatagtttgccaatcgatgaaaaataactgatgtgaaatatgaatttaattatttcttagatttgggtctttttaaacaagagtaagagtacaatatacgggggagcttggaactttgtatggctgaggttgtcatcaaggtcctcaaccccgcggcaccttgagggtgacctactgatgtcagctctatggatttctatatccctagatctgtcaaagaaacaaattgtagggctataatgtcaacaccgtggtaagtaaactgataactgattcaaaccgcataatcatagcataacaaagtcccagcgcatcaggctggcggtcgttgatttttgagaccttcctctctctgtttcttctatttcctctcttcgggtagatctcaaagccttgcaaatacgaaaccgtctcttgacctagatcaaagccgcgggacagagtcaaacatacctaccgcgcggtttatacttctgctagcgagagtcggaaccccaccatgtctgcaccaacgagctatggatgaagacgccaatctcggttctacttcggtataacatagctggtggcctatgataggtggtatattgactgaatatagcgccattcatgtgctgacgagtctaggaggggctgtcttctgttatcagaccctaggcccaaccccgttcgccgcggcgatgcccgcggcgatatctgggaggggtatatagtccacaatatatcagggtgtactgaatcaaactgtttcagtccttctctacattcggtctatcacttctgctttgcctgtcttatactggagaacaagtctcttcaccaccaccactactacaaccatacaaccataccaccacactccaaaacaccgtgcaatccccaaaaatgacagatccaaacccagtcaccctaccagcccccttctccacaatcccccgaacccccctcctgctaggcccctcaccaatccaccccctcccccgcataaccgcggatctcgccaaaaacaacccccacccactcgtaaccatctacgccaaacgcgacgacctaaactccgcgtacgcctacggtggtaacaaaacccgcaaactggagtacctgctggccgacgcccaagcccaaggctgcacgacgccagtctccatcggtggcgtgcagagcaaccacacgcgccaagtggccgcggtagccgcgcgctccgggctcaaagcccgtctcgtgcaggagcactgggtcgactggacggacccgggctacgagagcacgggcaacatccagctgtcgcggctgatgggcgcggatgtgcggctcgacccgtccgggttcggcatcgagcacaagaacaccgcgcaggcggttgtggagcaggcgaaggcggatggggaaaagccttactatatccctgctggtgcgtcggaccacccccttggtggacttgggtttgcgcggtgggcgttcgaggttcggcagcaggaggtggagatgggggttttctttgatacggtgcttgtgtgtgctgtcactgggtcgacttttgctggcatgattgctgggtttaagttgttggagaggttgtatcctggggatgcgaagaggaaggttattgggattgatgcttcggcgacagttgaggcgactcgggcgcaggttttgcgcattgcgaagaatacggctgcgaagattgggcttagtgccgatgatattacggaggatgatgttatccttgatgatcggtaccatgctggtatctacggtattcctgatcgtcagacttgggatgcgattgagtatgcggcgaagatggaggcgtttattactgacccggtctatgaaggcaagagctttgcgggtatgatagatatgatccgtcgtggggagatcaagggtggaaatattttgtatgcgcaccttggtggacagttggccttgaatgcttactccgaccttggtcgggttaatgaatagaccaacgaatcaagagatcaatatgcttaactagagaatgaaaatgttacataaatctacggctttttgaataactaggaagtatagttgtagcattgtagcttgtattatttcaaacgagtgactatagttggcgcgtaaagatgatcaaactagggaagcatggacgacgtcctagaacagcttgtgctcaagggtcatatcggactctggctggagaccaacgcaggcacggaagatgttaatcaaagcggagcgctgcttgcccagggcattgatgacaggggtgccgggaggggtcaggggagccttgagcatgtaactgagaatgctcaggacgctgtggaagcccttgtagtcttcaccctcgctgtcggattgccagctgatacgggtcatcatctcggcgagcacaaccagatcgatgatcaggggcgaagccagaagcgagtcctcacaaatgttgaacaagctgatggtctggtggccacccatgaagatctcagcgtagtactcatccagagcacgcttgttgtcgccgacagcaggcatgtacttgatgacgacagtgtggtcggggtgctcatccttctcatagagaacgtggttggccgcgaccatgtcatccacaacgttggacttggagatctccttagagcggaactgcttctgggagctcaggttcttgccgtcgttgttgcccaagtggttgtagctggcaatggaggtaagcttgataccagcgttgatcaggaagtcaacgagagccgacttcatcttggtctggccagacttgaagtcatcaccgccaatgaaagcacgacgctgctcggccaactgaagggcaccagggacaaaggtgttctggggcgagccgttgatgaacggagtgtcctcgagaatcgcggccacagcaaacacggtggaaggagcaacctccagatgaccggccttgatggagtttatcaggttgtcggcagtgtcgttgacaccgggaatgatgtcggcgtaccgctcagtgttggcagtccacatgataatcaccttatccaagccgttcttagccttgaagtcgcgaatatccttctggatctgctcgacgtgagcccagcaagccttgtcgccctcgatgacattgtcggcacggtcttcctggttggcagcgataaagtcggggtagtagatactaggcagcggcttcatctcggccatctccttgcggacctggttcttgagggtgggctccagcacctgagcacggtccatggactcggcgagattgaggctgctgatatcccaaccgccaatggtcaggtcgttagggtggaccatggggagcaggtcgtggaaggggatgttgatctcctcgccggtcttagcatcagagcccaacttgacagtggagctcatgacgatagaaccgtagtagttggaggtctgcttgccatcgcgggtctcccaggagatattacgacggttggccaagataccagcagttacggtggaaccgttgtttccaccccaaccgaccagcatcatacccaccttgccaaccttgcggttgaccttgaagttgtagttggtggccttgggagtggcaaccaacttgttgtccgcggtgcgggtgatctcagtagtctgataggcgtacttcgacttgatctcgtcttcggtatagacgacattgggggactggacagtaaagagggaagattcttggcgaaccgacccgttcagcgcgccattggcagcatccgagctagcgtgaggggccattgcgttcacagcgggatgaataggcgaattgatagtagtgtgtgtgatagcgtagccttaacggatatagggtgcgcagtccgatgctcctccacggttggatgagcgtcggccgttgaacgggtggtgccgcctgaagaagcagttagcaattgcatttctggatgacgattgcctcctcctagaggcaacagggacactcacgagttaagacttgtcgcgaaaattgtggcggttgtatgtgaccactgtctcgacgagaagtgatctgacctgctgacaaggtttatacgaacctaaggtaaacggacaagaataattgaggatagagagagaagaggaaggggaggaagagagaagaagaggaagtggcatgatggtgactttatgtgtctccgcctgtctccgggaccttgtcccgtcccccggcttccccctttttctttttttccccttttagctccagagcttctcgttggcgattgatcttcttattggttatatctcaccgtctattcgaaagaagtcattgtcaagccgataccgcagtgatggccttttcgatgttcccgactacaacaccacttctttgtcctctaaggtactaaccttctcgggtccatagttacattatgatcagcaacttattcataaatctccagtttttttgtgctgacagctactggggctcccgaggtccgcttccggcctcgggcttctgcctggccgagggatttatttccaaatacgaatttcggtgacgtgattcagtctaggttgtacattttgtgataactgtatttgaattctcaatacaacgcaagcattgcattgcaattgcacttgaggttataacataccggggtatacgtcaggccacgagccctcggctgaaccgtgctgcacatctgcactgcacatcggaggggtcgactccgcggggcagaatagcggtcagccatacgctcaaccttggaacgttgcttggcattggattttgcttcattggaagttttatttttcttgatagctgatcattcacttcatattatatgtggattatcctggactcagaaaggaattgcgcaggatagagagtaaatggttgccgagcacaggttgggagacatagccctgattaacctaggtagacctataaccttacctagaactttaggatattgtcagataaacttacccctttttgtggtcctttggaataattagttattcacatcctacgctgaactttaggcaaacattcctaattgaatgcttaactataggcttctaaatccacaccgcctttgtgctaaactcacatagtagcaagacagcagagcaggtacctacaatttgtatgggtgtccaactttattatctcgaggacggagtacggagtagaatccgccacgataatggatctcgagatgttatcagagccccacagcagcaataccttcgaaatttcaacccgtctacttctatcagcctccctcacaatgaccgtcaaagcttgtgtcacaccaggatgtgccaaaactggcatttgggcctgcgcaggatgtgagccacccaacctaaagcctggcactgcggcagagagtgccagaaggccgacttcaaaggccacaagctcagctgtggtcctacaattccataccactgcttcctgatcagtctaatgcggcctacattgagccattccacctcaactcttaccgaaattggggcctcgaaatgaaggagctcaaggaaaggcttggctggccgcaggctgatgaggctggaaaactctatcccgagaagaacattgatacttggtactactacatgtatcaatcggccggtttcaacctccccaagaacaagcttgccagtcaatgcctgggacgaaccgtgaagggcgatgtagctgtcgtcagatcctcgccggatgatgtcgatggttacgacgagtccttttccaaaatggatttggtaaggaccatcgattactacaagactgcaaactctcgccaggtgttccagcaacgagaacactcgcgacttccgcgcaaaatggggatgccaggggacttttgaaaggggttccccatttcaactcctagggtcaccgaccttagcaatgttgtgtccactgtctggtcgtgtcgcttcccatgtatacttgtatcatttgtctttttgtcttgctaaactgtgttgttgctgctttatgtctccgttgttattgaacgggcgtctcaaaagtcttttactgcgaaaacatattccggccttctttgaaacaaatcttgtctgcagttcatgaagatatccatattgctgttatttctggttgaccaagtattcctgtaaatcccactcccgtttctattacaaaatatcacaaatcgattatgcagggtactgtggtgccctatatgcagcaggtggtttcttggggaccatcatctacattgggctggctgatgtgcttgggcgtcggcgaagtatcatactcacttcagtgacgcaaaatgatcggggctttcctcatggctagttcttttcccctttcccagttggtagtatcacgagttatcctaggtctaggcactggtggtcaactagctactatgcctctgacaatcggaagtattactagctagcacgcgtggtgcccgagtcaccccgttggctggtccggcagggccatgctgcacggaaggtattggcagctctgagggcaaactcgaatgtactatgcatcgatataaaagccagccttcgccaccgttacttgcatggtgaaagcattattatggcatcaagctcatatgaaccgcaaagacgtgacgttttttacatttgggctcgtgagtatatattggcgttgggcaaaatttcctaatactactttcggaaccaggtccttcgcaaaatacttatgtaggtacttatggagttataaattagccctattttcgataagatctcgagaagtgtcactgtcgatattgtggcaccgaattaaatccccgcagtggggaacttccccgaagttgtgaaaaaattcaacatctccatcatgcccggtgcgaagaacacccaatgctggtaagccgcctaaatgaccatagcgctttggagacttgacactgacaatatttagcgatccatgtcgtgtacttcatcataaatgtgatactaccatcccacccccgggaaccagctctctaactgtcataggcgacggcatcttgccgcaatgcagccgatgcattcgcacaggtcgggaatgcgctcgaagtaaaaaagagacgaagttccgacaggcaaagggtcggacaacgcgtactaagtttcctagcaaccaagtttggcttcggccaccacctagaggttagattccatccgatttccttgagatctagtctgacattcgaccgttatttagttgactttgtactagaaaacggaagtggccaggtggataactcgactcaaacgacgctaaatgtgctgtcacctgggaatttgcatagtcatgctgactctattcctaaaccggaaaggctgtctcccgggtcctcatataccgcccctttgccgcaacatgattccccaaactatgaagtatatacgaggagtagtgctatctcgccaacactgcaggtggtgagcacacccgaacgatcacaccggcggccatggcccttgagagatcccgaggaagcgcggctgttgcggcattttgttgaaaaggttgcaccgttcgtaagtgatgatattttgttctgtatggtgagcggcattctgactataatatcaagtttgattgcacggatcgccagcagcattttgccatccatatcccttaccgagcacgccgttgcgagacgttatttaatgcaatattggccatgtcagctcgtcatttgaatcgcacaacagggtttgacccttttgtgtcggataattactatcaagcatgcctggagaagttaattcccgcgctggatgaccacggtgttacgatggatgatgatttattggctgctactgtaatcctacgcttgctggaagagtttgatggtgggtagtggatcccttcgcacatgtgtcaagaagccagttaacgatgatcatagtaccactcgcggggtccgatattcgaggccactccttcgggacaaaggctttcatacggtgtccatcaatgatgactacaaccccgagtctccggcaggctgtctactggagtggcctacgccaggagatatacaattcccttagcctccatcaggccccagacattgatttgaggtcctttgatttgaatttccactctaactcgctgggctctgatgcaggtgattgcgcatgggcgaatcaagcaatcactcattgtgcccacgttctggtattttgttttgggaagggacctcgctcagcggctgtgcatgcagagcttacggcacataatcagcaatggagtgagactcgaccgaactctttcgacccctatttcgtgggtgaagatgtggtggtgggaactgaattccccgatattcgttacagttgtccctggcacggtacgtatcggcgatatatcttggaaaccgttcgagatatgaaccgaggctgatcgcttgtgatgatagcaatcggcaatcaatatatcgatcttgcccagattctgctttctgtgcatgacccaactctgccaacagttggacctctgcgcagaggcctgatacaggaggctgatgtaagtgtcccagtaacccgtggaccttccaatctactttcaatactcaagcggagactgacaggtggttcaggatcatatccgtaggggggtttggacattatgtggcgcttcattatccaatgcctctgtacccccagccatggttgtcggttgtatggccatccatctctgtaagcatccgaaactattttcaacatcttctagtaagtataaacgaggctgaccaatatcacaggcggcgatcgtttcacggacccacatgaacaggaccacttgatccaggttcttatccaaacggatacacttcatggttggccaacccatgccctccagggacagctttgggacacctggggcaagcgatgaaagcgagataggcgctagtgtaggtacgctaagctacatatatgtacatgttgttatggttcctattaaaatacccgggcttggcgcgttaattcttgcaactacctaaatggtagcagcgtaaccaacaaggtacgtatgttgtatgttgtatgaaatatggaatacgtatttctacttttggccaagttcagggtcttgcatgatccgtggcgttgagtgggaagtagtggccagtaataggagcgggctcggatggaagaaaaaagggccccgcggatcgccgaaaaccacaaattgattcttttccttgccgtcttctaggaatatcccgacaacctttggaatatcgccacataatcccatcaggcctgtctgccagaaggaagtctgatattgcactgtttgtgtcgaaatccattcaaaattgcagatcgagagataacccgccgatcgaatgattgcaagtctcaaacattcacccgggaaatgtgattggtgctagtggaggatcagacactaggtacggaccagtcgcattgcaagctgtgtctctttttccgtgatgtgcgtatgttccctgtgcacgcatttccttgggctccactggcggtttgggagaatggatggatttagtgatgttagtggatatagtggtatagagacacttcaagggctattattacaacaacgcactcggtatatctgtaaatagaataggcaatatggcactcatatcgcacaatatctcatatcagtatcttataataacctcagtactccgtaactcccaatgtaacccctgaagacagttacgcaccccctttccgcactggagacgctaactagactagcgtgttttccgggtctggcacaaagcgcagtcccccatacaatcacaatcgctaattctccttgagatctcaacttcagcttttcttcggacttgctctagaatagtcttccccatatctcgaggggatatggcccactgaattcgatgttcacgatctttgatggcttcaatgaacatgggcatgttgcccaccatcaaatgctccaattgtgggtgcaacgtcgagatctcctctatgggggatcatacctgcattcgaaatgagttcggtaggctttgaatatccaatatggccccggggaagtctacatgctgacttttgctccagttgcacctatcccatcaccgccttcatcggcaggattcgaatcggaccgtttcatagaggcaaaggttggccgagggaggccgccggctatagactcctccgctgcaagtatgtctcaaatcgccatgtggaaagctggagggattcccgactgacccttacatatagatcgagcattcttgcagcccagtatgccgacaccagttaacaatctccatctaccacctctccctgccagtccagtacctccatctacggtgcgcccgtatcagcacagtctgaccgatgattcggtcttctcattccccatgcctggaaacagatcgccgactgaagtgaggacaccgagtccaatgacggatcggactgcgcctaaaccacggccaccactttcgtcgcagggacaagggctgagcttgatgccagagaatataaaacttccacctagtccaatgccacctatgtccccggataagaaccatcgcagggaggagtcggcggtgagcaacagcagctatcggacctctttggctagcagtcgctacggcggttctacaacgagatcatcatccaacagcctttcgcgtggtttccggtcgtttatggacgataccccaccgatgccactggcacctctccgcacccccaatcaatcctctttctcccgtgattccaacctctcggcgggatcccggattagcaaggaagaagccagtggattcgactttggtattccagaagcccaaagcccgattaccggactagatgatctcccggaggaacctccttcgtccaaattccaggataataccaaatatgtcgctttcaatcctgcgaacctccaccctgcggcagcgacgacagagctaggtaacgatgcaccaaggaaaagctctaacgcgagtacgacgagtgcattttccgtcactagtttcgctcgagctctcggtctggaagagcaaatgaatcactctgaaagctctggctccgattcatctccttccgatgcccgcagtggtagttccatgtccagtgttccttccgatgtcagcttgaaccgacacaaaccctccgatccgctaaatctgtcacccttggttgaagaactgcccgctcggacccgagagactgttctagaaatacctggcagtataccgagcaccatgggcgatgtccctcttattccggctgctttcttcagcccggattcacccaccgacccttcaatcaaccgagatggcttgtcgttgattgcagagaggaaacatgtgcctccgacttcgctcccagcacaacccaagcaatcgatcccccggaagccaccagcacaacgctcatttacagcacccgtaccacaagcacagccacaaacgccaccgacacccacccggtccgtgacacgttcgaagggaaagtgtaaaggctgcaatgagataatcacaggaaaatcgatatcatcctcggacggacgtctcacaggtcgataccatcgtggctgtttcgtttgctttgagtgccactctcctttccaaacggtcgatttctacgtcctcaacaatcgacccttctgcgcgcagcactaccacgagcgcaacgggtccctttgcgccggttgtcacaccggcatcgagggtcactacttggagaccgtcgagcggaaccctgcacggtctgatcgccgtcgattccacacccagtgcttgcagtgtcgtacatgtcatatccttctcaagggcgactacttcgagtggaatggcgaagtcttctgcgaaagagatgctcgccgagccgctgctgcctcccacccgccaccccctggtcctcctggtcctcctggtcgtctccgccccacactacctccatctcccctggcccagtacccaccaggcccataccatacgcctggtggaagacacggacctggatatgggcctgggcctgggcccggactccaccccggtgccccattcccccctggtggtggaggacgattccccgaacgacggactactaagcttatgatgacttgagcaaaccgtgcttgtcattcttctttcttgtgaaatcttgcaaaacgctgagttgcacattccttttttccgcatatctaccgcggtttgtattccactttcttcattcctttatatatcgcgatataccctctgtgctatctcgcccatttggctttcgctggcaatggtgttggtcgtttgttttcccctctacatcagggctatcctacatctgcatccatcgaaaatgccccattggcatgttttgtgatttttgggccatcattcgcggtggtgtatttgttgattcttcatgccgaaatgtttctaatgtactctctatcggctcggtgtttggttggcggattatctcttgtacatgatttacaactagaatatgaggacctgtgagattgatgccgaaaatgaccgcttttgaggccagaaacggctgcatttccacccgtaactttagacgtgcagcggccctcaaccgacccttttttgcccgcccgcaatacggtgatctctcgcctttatggcatttctgtgctttacgggcgactaagtgtgccatcggaacatgactctcattgaatggagggcatgggtatatgtggatgtgaccgagagcggcggcttccgagtccgacggggaccacaggaagtctgtggtcggcggtagtattcggaccgtctaagaaaccttacctatattgagcgagtggttgtatccatcctggttgccagcgatcacacgttgaaggtctattcttcctgctaactgcggtcttaacgctgcgggatagataatcatccaaccaattgagatgaaataatgatttgtctacgtcattttgaatactctgcggcgaattagacgcatcatgcagctcctcgggggatattgaaatagttgtagtttccagggcatgcgtgaaggcgtgcaatgagagggataggaaggcgaggtagaatcccacgcttttgcttctattggactgggacatgatgaactcccgatggttccatatgaaggaggctaggaaaccagaaacaaaaggagggcgtgctggttatacaagtatggatccataacaaagaacggcttccgcccccaatgtacggagtgactgcagaaaaatgggggctgactacggccaactcaatgttggaaccgactctctccatcataccatctttctaccaccgctttcctgcacttcggccaactccaaaatgaacgctatagactctgaaagatttttctggggcgctccaacttcgaacgctaagtcagtataccatcttgcgcattctttatttgctgacctcgacaaagcttctgtgagacggactacgccgtgagcagatacatcgccgagtttgtcaacagcttgacgaatgtcgtctacagtaagatactggaaagaatgtgaaattctgatctaactgatcttcatcggtaatctacggcatctacgggctacgctacctacgacggaaagcgaacaagtatggtgattctttactgaatccacgcaaatctagtctatggagtacttttcgagccaatgcttgcgtttgatgtgtgatctgccaatcggattgcggaatgtgcccggcaagtgggtctcccagctggcataatgggctgatgtgcggtcaatagttcggtgggtgtgggggaagagcagggaagacgggtcttttatatcgggagtattgaagggaggctacgagacggcgtattgatgcgctaaaccctcggaggcaaaactaactcgaaaaggcaattcacagggccgccgtttacaagtttaatggacgtaagacataatgtgtgttctaagtttgatcaaataacctaaatccatgcctcattatatcgtaaacattgatataccattgcaatcatttcgacttgtgattctcaagctctagtggctcaaccggatagaggtacacacgcttcatgatccagccgaagcaaatgacataaagcgccaccgcgatgatctccatacgttgtctcacagtgatgcggtctaaactgggatttggaacacccaatacacccgaatgttccttctcccacccatcgcagacctggcggaatcgaccgggctcgtcggagatgacgccgtcgatctcgtgtcggatacaccaacgcattaggttcggcgaattcaccgtccagacatagactttacgccgggctgcgcgcgcctcatccaaaaacccccgtcctagtgggcccatcaggatcttctggttgatgttgaaggatataaggggtacttgtaggaattggcgagcatagctcacgtcgacgcagattagtgtcactgcacacagtggcaagtgctttgctcgtgcggggaggtatcgtgaagaccagaagccgagaacgattcgtcgctgccagtcggggccgcccgcgggtgtagggactgactcgatggttttggcaatcagttccattatggcgaagggttcattggcgagctgagaagttgattatgttaatgaatgatgatgtgcgaatcggggagaaccacctacctttatgtctagcaacatccagaaattctcccgacctggttgtcttaggtattctaacacatcggccaaccggggcatcggttcatggggagcttgtatagttcgcagagtttttaaatactcccagtcgcactcgctgaccttcttcttaataccgtagcagcgcatgaggcttgcatccttggatcgatgagcgtagttctagatcgggtgtatgcacctacgtgtgataacaccacgattccatcgcgggaaatatgaaggtcaagctcgagggcttgagctcctgcccgaatggcgccatcgattgacaatatagtgttctcgggatattggcccttgaatccccgatgggcgatggcttgaggcaaacgcgggcaggcgtgggcaaccggtgatcggtggaaatgagcttgcgaggacgagttaacttgataacaccgacacggagagttacacacctggaatttcatgcaaatgatcttgcgaaactatagacgatgggtcgcccattttgaaaagagttgtgagtgttgaagaagagatgccatcggagtttggcggagatagaccccgctgcacggtctaatgtggactcaggtgctcacagttgctttccagactttctattctcgtgcggaaagaggccaaaagatcgggatcagcacttaaagatctctgtctggtcttcaaccgccaggaagaaagcagccctggagctttagagaggaggctggtcgaacaccccgattactcatcactagtgaggtggatccgtctccaatttccccatgttgatttatagcctccatttcccaagttgttgtgctcattaaattgcatctgttctgcgactaagctggtagacaatggccgttcagcaatggatcacgcccttgaagggaattgacagccttagccggaccgaagctcccgttcccgtaccagggccgagcgaagtcttggtagagatccgtgctgtctctctgaactaccgcgacgtggaaggtaagtcgcccaccaagaataaacatgtaggacatatgctgaaaaagtctttcaaagtgaccaacggcgagtataagcatcacagaacagccaaccaggatgccaccatcgtaccctgctcggacatgtgtggggtagtgacacaggttggatctggcgtgagcaagtggacagtcggcgaccgggtgctttcgactttcctgccagatcatcaaactggccaggtgactgagaaggagcttgccaggagcctggggctgccgcagaatggtgtccttgcaactcaccgcgtgttccctgattacggcctggtgaaagcgcctagcttcatgtcagatgaggaggcggctactcttcccatcgcttcagtcacagcatggatgtctataaatggtttgcgaccgatggggcagagcggcgggaaggatgaatatattttactccagggaaccggtggtgtggctattgccggactacagattgcgaaggccgctggcgcgaagggtgggcaatcggattattaccgcttataagacctaatcgctgatcttgcaaacagttattatcacctcctcgtctgatgctaaattggagcaggctaaagagctaggcgccgattttaccatcaactaccgcaccaaccccaactgggaaatcgaagtgatgaaggtgactgagaaccacggtgctgatatcatcttggaagttggtggcgctaaaaccttgcggaagagctttgattgcatcgcttttggggggttgatcgactgcattggctatgtctcaggcaagatagatgccgatgaggaccgcttgaacgtcaatctgctggctcttcgtcggacggtcaccctcaaaggaattatcaacggcccgaaggatcggtttgaagagatgatacggttctacgaagaaaatcagattcacccagtagttaaccgggtcttttcatttgccgattccaaggaagcattcagatttctggaaagcgggagccactttggtaaggtagttatcaaagttcaatagagccctagggctctaatggtgtcgaatctcattgtcgaattatcattcactcctgattgccacttggcttcattatcccagcgccaattcccagatcttctcccatttccttcccagccaccgtcaatttcttgcaatcctgcagcacgaacaggagacgggcccattctgtcccgctggtattgcgccatccatgcatcgtagcccgctgcacagcaacatctcctctgttcatgatgactggctcgctatcttccaaaatcatttcaacctgcccctcgagtaccacgccgtagtcgaggctctgcgtccggtgaacgacagcagggttgttgggcgcgaagtccacaatgcggcatacggttccaccagggttaacgagtcccagctggccggattgtgtcaatgtctcgtgggtcttgatgtccgcgtcgttgttgagatccggagggaattggctcgtataaacaacattgaatgccatcttgcctttttcaagtgatacccattcagccggtgtcgacgaatgtatcactgccttcccgttctcgttgtgacctgtgatatgccgagtgactacccgcaaaggcgacacttcactgggattggaagccattgtttataggacacgaagtggaaatggaggtatgaagctgttgaaatcaatcaatgtgcggaatacaatgtgtgccctcggatgattatatagtctcactccacgtgacacggggcggtgcatgtcagcttgaacagcggtgagctggatggaaccgcaatggcttacgagtatccttggttggatgtgggcgtgttcgaaagcgaccatcacgtcagacctgattagaagattgtcggttcggttgccactttcggcgctgactgcgatcccgtagctcagatcgggcgcacaaaagaaaaatccaagagacaaatgttgcagacgagttcaactacatcgatataagccaggaaccctcccgggggagcttcaggattcttttttaccttggtccacaggtaggactaccagcaccaccctaattcgcacgcgaggcccatatccatggctgggtatttagaggattgtgatgattccaagggagtaccccttgcttttggaggttcgatttctctatgccgactctttgccgactctgacacacattcggccgacgaagaatccctcgatgatatgtccaacgcgcatttcgtcgagtcgtgcacatatagacaatcaccaggcagtctggctttgcagttaagcatgcctcggtttgaccgtaacctcagcaactgcatagaagcataaacgcctcgtactcgagatggcgacaccacgctcgttccagcgcgctgctcgtgatcccaccaggtaccaccatcagcagagcgccggcatgccgaggaatgcctcgcaatgcttatattaaggagtcggttccgatttgagcggtggagagtttatgtgaaccaatagcttgatgcaatctaatctaacacgagaaaaatagtgagttgatacaccagagttggggggcgtgggggtgtgggggttcttggacgacggaggttatagttatcttggaatcagatatggatggatgtaggtaaccctaatatgaagttagactgtatgtgtcagcgagattaggaacatgaggcttatggacagatgtatattcatttcgcctaactagatatagatgtgatgtttcaaccttgcttttacaaaaaccatcggaactcagcagatgcaggcccatctctcattcgctccgttggaatatcccgtgcccggatcgtggttccatcacgacggtcacgtcgcttgttatctagccacatgtagagtgccagagaagccgtcaagaaagcgccagtagcaccgaatgcaccaacactgattagtgcgggagtatacttaggcgcatcctgcttccggaacaagttgctgctcactaagcccatcaagttggccaatggcacgccgatactcgtcaacagtacacggcgaccctcgtgggcgatgttgttattataccaggtgctgagaatcacagatggggcggacgttccccaggtcatcatgaaggttgcgaagtaagcgacgtggatgtttgctgggacatcgtcaatggatgcgtagatcatgaacccggagaaagtgagcaggaagcccagaacaatgaatggcgatcggagtctggtccagtcagaggagaaaccgagcactagcaacatcactgctcctgtcacattgggtgcaacggtgtacaggttggttttgacggtgggaaaacccaatcccgcgatgatctgcggcatgaagagcgcgacaccctgcaaaggcacaccgagacagatttcaatgcacaagaaggcgtatgtagtggggctcttgaagataccgagggcctcgcggaagctaaactcctcgttgaccaccgcactggagtcgacttgaattcggtggaaagctagcgccttctcctcctcggacaaaaactttgcctcggcggcgctccgtgggagatagaagaaggcaaatgcagcgaagagaacagtgacgccgccctcaatgataaacaaatagcgccaattggggatatgggatcccttgatctggaatactccaaacgcaataagtccggagaaagcgtttgcaatgttcgacgcagcgtagaaaacagccaggcgacgagccagctcaccacgacggtagaatgtggtcaagtaatagatcaccagcgggaagaatgcagcctcggacatgcccaggaaccagcgcaaggcgaacatgccactgaaattataggtggccgaagagagcaccgtgagcgaaccgaatgaaaacatcaagattggaaggacgcgggctggactgaacttctttccaagcatcgagaatggcggcgcaaagatcacgaacggaacgaaaaagatggataacaggagattgtactgattcggcttgaagtgcagatctaaagattcgattagactcaagttgctgccacttaggtccaggatctcacatacccgtgctcattccatccgtttccgcatttcccagatttcccttgtcgagggcgttgaatagatctgtcgctggtcagtttctgcatgaatgacaagattggggtcgacttacacatgattgctaggatagggagaaggcgatagtcaaacttccgacagagacgccgttcagccttgtggtcgacgactcgggtcacctcttccatcacacccgggaccgagccatagtttttcaacgtgttgggctcctcgatagtggccatggtttctgttttcttcgctgtgccatcaggcgacgatgcgcgtgctgggctcgacatactgtatccaaggtgttatagacgaagaagcgtagaaaggccaagtcagcgcaccgcctgtcagttataaaggtccagaatccaagcttcttatcaaaggagaggtggcatcccttgttctctctgagataggaagacttcgggaatgttgcacccacgcataaaggacacccccacgtttctccgcatcatggaagctttagctgaacaggcaaagatcgcctgagatagtcgcatttaggccgttggggtgcttatagtcttatctgcgggggaaaatgtaagtacatcccgcgagcttgatttgaattctataccgataagtttatgttcgtatcgccgataaagtatgcccctttctctcccttgctatcctacgaagatccgtatctcaccgatttattcccgtttctcaatctcctagacatttcttcgcataagagatatcccaattccggtgtatcaggtacagttacatccgtcgcatgacctcaccacatcgagccacgcttttggaataagacagcgaattggagtagaaaatactccaaaaaaaaacgttattcttgatcagggacctaaactttattaaaacttccatggctttctcggaggcaacattagcatattcccggaaacgggacggcgtaattatcctagcatagccaattatatattgagagccaattcgaatcacttcctgattactcttaagttaagcaattggaactgtgtggcgcattccaagtctcatgcagggccttgcacgtgaatgttatcgcagccttggcggggatagtcaggacagataacaggtacaacttgtacggagtacttctacatcgactgtccacttgaaacatttagttattcttcaggatactgacattacctaatttatccaagatcccggtaagaaagctgagaaagaagctgcatttaaccactcccccgcaatctgtctttgcggagatacagcggggaaatagaggagtcaatgtcgaaaagaatgtacccacattatccggacaaaatcttttgatgattcattataaggtgagattaaggttgtatttgaaatctaggaaaaggtgacccttgtaccagttgactacctaccaccgactatgtttcaactcatatatatatttataatctccctgcgtgctcacttagtatcttcctaccctttactagcccgaggaaaccatgatggcaagaatttccactgggtgaatatatggactgctatgccgcagttggtcgagcccactaatctacctcctgttccatttgtacgttggatattcatcatggtaatgggatcaagtaaggcaaggtctctatactgatagtggcgtgcagaatggatccaccgctgtattcaataatactaccattcgccaaaccctccaggtttcattagcagcacaggaaatccgtattcgtctctctaatgtattcgggccaaacgatctcaagatttccaatgcgactatcagcctacctgcaagacaccaggtgggaatcagagctctacagacagatacattgaagaccgtgttcttcgatggaagcccagatgtggatatcccgaacggtgggctcgttgtgtctgacccaataaagttccctgtcgaggcccaatcggctctcatggtcaacatatatctcgcagagggacagcaaggcttctccattactggccaccctggaagtagaacgacctcatacctggctttgggggactggactagcgcagagaacctcacagactcatctgttcaaagcacagatcattggtgagtctttatcccgcaaaccttacaattatcccagatccgaatctgtatctgacctctatcggatggtaggtactttatcagtggagtggaggcttgtctaccctttgagtctagtggcttcgtgatcatcggtgacagtatcaccgatgggcgaggaagcactacaaatggcaatgatcggtgagtggactgttccacggtctattcttatggcttatggatttaagttggccggatctattgctggcaagaatgcaaaaacataaacccacgtcaaatatcgccattctcaaccaggccgccggtggcaatcgtatcatacaagatggtctaggtccaaacgtgatcagccgtcttgaccgggacgtcctagcacaatctggagtgcaatatgcgatgatcttcgaaggcgtcaatgatattggcgtagctgatagtgatgcagctacgcaggcggatatcgagaagaaacttgttgcggcatataaacagatcgtgacacgggttcatgcactagggattccggtatttggtgctactattacgccattcggctcgtcgaggagctccgagtatgtacagctttactcaagtgctgagcgggagaggactcgtcaacgaatcaataaattcatccgggaaagtggcatattctatgcggtactagactttgaccaggtgttgagggatccgtacgcgccatctcagttgctggaaaaatatgattcaggagaccatcttcatcctagtgtggctggatatcaagcattggcagattttttccctctcagggtatttgaatgaaattcacatagttattctcgaatagtgggacaaaagcaatctcgagactattgtccacatatgcaaatataggtatatagttttcggaccaacagatgaaaggttcaaacttttcgctcgaaaaacagagtttctttaaacacgacgtctgaagttgtcttgaaggttgcgctttctgtaagcgccgccaccgacaagagcctgcttgcggccagggccaaagtccggaacaccgccgagagaaccgaagatatcaccgacgtagttatttgccttgataccagccgcgaaagtagtattccacccgtccagaataccctcgacaaccttgataccagcaacatagaggttcttaatagcaggctcaaatgcgccctgcgctgacgactggaagaggttataggtcgccgaagaaccgggataggggcgatcaaagtccgacgcagtgcgcatcacgataatgcgagagaaatcggtcagcttgtgcatcgaggatcggagcaagacttcgaatgtagcgttatcctcctgcgcggttgtgcaatagtcgcccgttccattagtcaacaccttggtggtattctcgaacaccgatccgaggatattgccgctgaagtacacatcggaggtcgcgacatcacattcaacaacactaggagatagggtggcagccttgtacttcccactaggggtcttgtagtgggagcggtatgcctgagcagtggcagagtcggagaggtttgccgtgcgcgcaaaattagcggcaattgtgcgtaggtcagcgttcacctcgaagacctctgtaccgtagatgctggtcggatactggcctgggaattcggtaccttgcgcaacatacccggtggaaaagttgctaggaagttcgcggatatcaatttcatactgcagcgcgacctggactgcgtaccgagcaaaggctgcggatccagtggtagctctcttaggattgacgccagcaatgcccgcgacaaagaagtaggtttgcgtgagatcaaagagaggggagaaagcaacagatgtgacagtcgcagcagcattgatctcgccttctcccgtgatgagttggcaaacatcatagtcctcggtacagaagacgtccgggaacagtggtgagagaccgggaatggtgatattgtgggaaagcaggtcgaattcggggatgttccaccaagcttcagcttcaggtgcaaactgtcgtaatctattagcgacattgcatttattttggtggaagcgcataccattgacacgataaacaccttcggggcaattgctccacggtgaccctgctgggcggtcccagtagctccggcgcataatgagctgccagcgagcagaaatgaggccgtcagagtctgaagaaggtgcatggtgaggggagttgaagatggaactctgttcttgaacaagccgaggccttttatttgtagctccgtagagctgtgaagatttggtacggaatagcccttgcgtctttcgcgctaaggatggaacattgccgatcagtggacatattggtacctgattcggagaagatccgcaccgaaacgtggagcagcttgccccaaaaacgccggagattctcctatcgccctttctgacagaattctattcgtccgaggtagatggagaacacaagccattgatacctggtttttgactggccctttgaagttgaatgtgggtcgacagtgatagggtttcacctattattttgatgactgttgcttttcaagcatcggagcttgccggtgaacgttggaagagattcagaaaaagaacgagctcgatggtttcacagttctttaagatccttgttgtggagcgttgccgagggatacttggtactcgcgttgtaccagttgacccgaatgactgctcattgtcattctgctcgaaatatcgtgtctatcgaactcaaaatctatgccgtatccgggatccatctggtcgaaggcctgcctgctccgtgttagacgatgaaaggaaactgaatggaggatgagcttacctttccggagacttgtttactacgaaatacatttcacaaaaaatagaacactcgtagatcaggcgaataaggagcattagatagatgaaacgcaagccaattccctgaagtataagtccacagagggtacatgaccaattgcaatcaatttgaacaaatcgtagtgaactacctgctgctcaatcattcagacttccaccaccatttcatgacatcgccaaacacccttgctcgtacgagccacatgatgattgaaggaaatgtcgaggacagaagaccacaagcaatcgtgtgcaaattgcggttatacctgaaagccagcataagaaaatgaagtcaaagtcaactttcccgagtccgatacgacctcaatatcctccgcatcttgattcgggtagattagggccgacaacgctgcaacaccaccgttcacaaacgtctcaaccgagttccaatcgacgtaaattgtaagctggaccgtgtccccacctgcaggatttgtcgcagtccgtgtcacgtcccaagtctgtttggcatccgatgtcaaaacatccgaagcggagccgtcagagtccctaaccaggaagagctgggaattggcgaagtcgtaaccaactgttgtgttgtaggttccatcggacttgatccggaagtaaaccgtgttgccatcatcaccatcggccttagacaccgttgcttgaataacatatgcacccccagcgagatcagcaggaagcgatgccgttgccgggtctgttgttatttcagtcccatcagcggagacagggccagcaaataagtctgcatagcctgagactggaaggctgactaacatgggagtcccattgattgtctgatacttgatctcccgcgctaaactttgctggccctcgaagtctccgtagtagggcagataggaagcataattccagctattcatccagccaatagcatagcggcttccaaatttgtcgtctggattttcccagctgacagtggcgtagaagtccggaccttcatctaaccactgtggaacgctggtcgtgggtgtaaaattggtgccatcccatgttccagaccaataggcggtacctgttgtctttccataattgtacccattcgcaccgacagcgaggacccagccacgtgccgctgcgtcgccgtcaaggttgagctggaataaatctgggcactcaagagtacccaagtcgacaccagaggccactggagaaaaggtcgagacgaatgtccaagtcttgaggtccactgatgtatagaaaccaatataggttccttctgccatcacagtaacccactgttctgtgtcgtcgtcccagaagattttgggatctcgaaaggctggtttattgtctgcgtccgggttgggcatcacgggatttccctcgaatgaagtaaacgtgtatcccatgtcggtggaataaaatagcgactgctgctgaacaccgtctcccatctgagtaaggatagcaacaacagcattctcaccgaagccggccgtgttgttcacatcaaccacagagcttccagtttcaatgtcgcctagatccacgtcgctgacagagttgggttgatacttctgaatagccacaccctgatgagtccattgcaccatatcggggcttgtcatatggtaccattctgtcccacccgtgccggggtcggagcttatccaatcggaattccagaggtaatagagatgccattcatcccccacgtaaattgggcgttgggggtcattcatccattttgtttccggtgtgatgtggtagcttggtcgcgtctggccggaggcggaaggaaccattgcggctagcagtatagatgatgctagaaaaaggcgaggcagcagcctcttcgctgcagtgggagaactcattgcgatatgagcaaaaaaaaggttattgaaaggaagatctattggccggaatgccaaagatgacctagatagaagtttaggaacattcttgaagatatatatactatccctactatcctcctgtccttaggaatgatatctccttgcataaaacaaatgcctgaacgatcattccattgcaggagactagtggattcagtgaagtcaggtggagtcgagtggagtcaaaccgcccgtcccgcacgagtttatcggaatttcgctcagccctttttgtatttgacattggcttcttcgaaagagtttgtggttgtgccgtggtatacgccacgtggtatacaattgagttgtgccgaggctggattatatgaagtctgcttatacgaagtactatttctcaaactccgtagtactaccactgaaacaccctagtgtcccatattgtcggaggatagctgaacttggtctaaccaaatacatagtcgtattccgcatcactccgacctattcccccctgctcatgcaatcctgccaaaaccagccactgggtccactacaatatacgaactcgcagtaaaaaagaatatctgaattcagcaactagacacatgtgaaagtactgaaccccgcagctgtgaccaaaggggccaacatctcatcccgcaggtaatttacgcacccgtgatccatttcatcacatggaagtttcaacctatcattattatatggaagaagaatccggtctggggttggggagatccgtggacgagcgaagacattggttacgactcaaactcaaacgccataaggcgcactcttgaagcctcgatctctactctagtgctttagtatttgtgctttcactatataaaggatccgctaataatatgccgattggttctggaacaaacaaccacaaagttagttctccgccaagactgccagtgcaatatatcgctctacactatgttgtatatttcatttggcgccaggggctctgagttcacaaaaaatgctctgatgcttgcggtataaactcatatggttcttgccaagtagcccctgaaatacaccgtatgacccatgggctcaagtggacacttggtgtttgacagattctcataatgtatgttgtagtatagcattctttactaccggtgtttatcacgactcatagccacagttatatctatgtgcatttagtgccttctttctcatctcggccatgttgcggtatagagccagcgaatgggccctgctcgtcctcgttcctaagaagacataagcgatccagctagtccccaccgtggtcgacacgacaggtcccggcgccggataaatctcggctctggtgacatgaggtagcattttaggcagtactccgtactttgaaaagagatcctcgcccacgcgacactgccctacccgacactgccctatcagtggagacgcccgacacaaagcccagcttgccaagtggagatcgtcgacctgttctggagctagcgtttgagatttgaaccgtctcggaaaattgtcggaaagcgtggcgccgctggcgtcggcaaagcggggaaagttgtctacgtacctagaggaagaggatttggccctcccacatgacgaagtttgcgtcaacctcgggcctgtcgatgtaccctgctataccaggttctccttctcctcactcagcatacgcatcgccgcgcctatgctggtgtcatcaatgactctttttcgacacctttagtgttcatgccctgacacagcttaacaactagcgggcactggagtgcttagagagtctcagcacaaacacgattgtcgagggtcttctctttctaaggcgacagcttgaataaggtttcttaagcaaactcgcacatcctgctttatggccccggtcggagcgttcagcaggtcagcaagcgcggtggccacaaacctcttcaccaagggagcctcagtgcagctcgagcaaaggctctctgggtaggtggctgggacaggaataattcggctccaactagactgcgaaatgacgctatcgacatacttggggtgctgcattcgaatcaggagaatgtcccggctggatacgtataatcgtctcatctcgatatcggcctcaaccttcgtcgaccaaaacgggtgacatagctatgcgtggcacaatcgcgttagggccgttccagagatgttgagcgattcatcggggtttgtagtgagagacgggctaagccgcagattgacgcagtgataatagaccagagcatgccctcggcgcaggcattatcctccctagggatagatagatagtggaatctatcacatctcttttttcttttgctttttgctttttgttctttttttggttttttacgcctctcctcctaggtccacgaccacatctctgatgaatggaaaacatggagtcggtccaaattctgaccatatcctcctcaatatcctccctccagggtacagcactaagcccgatcatgggctcatcaggtgaatgactatatatgactttggctgatgggaactccatccgacgccgttcaactcatcccccgtttccggtgactagcgcaagatccctcctgctttttagcgccattccgtgatttatcattaattggcgtgcctgtctagtaatttcccccgcgcattggtcctttgattgctcagcagcaccgtgttgtgctgctcgcacgcccgcgtcttattactttcgaatgtgcctccgttgtccgttgctaacttcgtcttgccttgattctcattgcaagctattggctagaacatttgcagtagtcgactcattgtcggacccattggctcgggcaagtttacactttgcaaggcgatactcggagagattccttttcaccagggtgaaataacgctgcgcacaagggctttgtacgtcggattttgcgatcaaactacctttctattaatggaactaccaaggaaaacattataggcctctcttcggtaaacgaggaccgatatgctgaggtagttgaggcaacagctctcgcctttgactttaaaaccctaccacaaggagatgagacaaacgtgggttccgatggtatatccctatccggaggccagaggcagcgaatttccctagcacgcgccctatacctacaagccaacttacttattctcgacgacgtctttagcggcttggatgcggacaccgaagaacaagacttccgcaaagtcttttcacctgaagaactgttgaaacgccgtcaagccaccgttttgctctacacacacagcgttcggcacctacaggcggaagactacgtcattacccttggaaatggtagcgttagtgagcaaggcacatttgacgcactgatagctggtgatggctacgtccaccgtctggggttgaatggcttgtccgaaagcgagacaacgtctgaggaattgatcatcgaaaacaatgtacaagaatatttgtcgccagtggataagataaaacgggccaagcttgccgttgcccccaatttggatgcgtcccggcaagttggagatggcactgtctacaagcagtacatgaagagcatgggatggctgctcgcagggtctgcagttttctttgcttttctcaggggcttcttcttacatttctccaccatctgtaagtactacacgtctttgaatacggaatttattctagagaggggttcttggaagctaaccgtacagggctcatgtactgggtcgaggacgcacaatcgcaacgcccaaaacaccattccgcttactgggccggaatattcgcgctgtttcagatcggtgtcttgatctcgctcttcctacttggcgctcccatttggattgtctctatcaaacgcgctggcgcaaacctacacatggatatcttgaatacgctggtctgagcaccactcagtttctccactaaaactgaaattggtgtcacaacaaacttgttttcgcaagatttgaatctcattgacacggagctgccggatgctacggtcagcacgcttttttcggtaggccaccgcataacgaaccattcaggagacctgagtccaacagctaacatatggatagatcacccaagttgtcgggcaaatggctgttatgctgacggtgtctccctacttggccatcactttacccttcctcgccgccctgctgtacgtgctacaaaagttttacctgcgcacttcaaggcaacttcgattgctcgatctggaagccaagagcccactatagtaagtgaattagagaatatcgtcatgtatcttcactgccgttactgacacacgtttagcacgcactttcttgatactgttagaggcatcacaactttgcgggcattcggtaggtaccagttacccaacttcctgcttgtccgtttgatttacggtctctaatccaacgcacataggctttgtccgcgaagatatccaaaagaatgcctgttttctcacctcgagccagcgaccttcgtatctccttctcatgatacaggaatggctgaatgtcgtactcgatgtggtagtcatgctgttggcagtagggttgataacggttgccgtgcgcttccattccaactctgctctcactggtgctgctctatacagtcttttgagctttggagagaacctcgctggtattgttctgttttggactaagcttgaaagctcgcttggcgcgattgccagacttaagatattcaacgagacgaccaagcctgaagacacagatggagaggacattgacgtacccgaacagtggcctcagcgcagcgtggtggaattaaagggcgtttcggaaaaatatgcgtaagaatcacaaaccacttaccataaccttggaagatgcaccactgacttattattagcgccaaagatcaggacgacgggaaaacgagccttactctccccgatattcagctaattattggctctggagaaaagattgctatttgtggtcgtactggcagcggcaaatccagcctcgttgctctacttctcaagctcctcgatccaatatccaccacgacggagaatattacaattgatgacctgccgcttcatcggctgaaccgatccgtgctacgccaatgtatcattgcagttcctcaagaatccgtcttcttgcccgatgggtctacggttcagaacaaccttgacattgccgaggaggccacccccgaggagtgcaaggccgttcttgaatccatcggcttatgggactttgtcaaggaacgaggcggcttggccacaaggatgaatgtctcgagatttagcgctggacagcggcagctgctctcgtttggccgagcccttctcaggcgctccgttcgagagcgcaagtttggggccactgggcaactgggcggcatcctcattctggacgaactgagctcaagcgtggatcaagagacggaacgcatcattcagggcaatattaggactgagttcagagactacacggtgattatggttagccatcgattggatatggtcatggactttgacagggtggtggttatggataccggcgcgattgtggaggtgggcaagccagccgtgttggtgcaacaggctggaaccaggtttggtgatctggtaagagcaggaaacaagtagattgaatggtgttagtgcaatattcagatgaggatgtcgagataggaatatggcccccctaggccttaaacggaaccttggtttttgttatattatatataatacgatggtccgagtgatcagagcgcatcagttatagtgaatgtgactatgtatgtagcctaagcgtatcaatatttactctgagggcctctaagcacccaatgaaactgcttaaaaaggaaatccggtacaggtacatgcgtaacgtgtctgtccaaatgtcgcatataacaatagcgggaaggccagttgtggatgcgctgatgctggggctttcaagccaccgtgactacatacatttaaacgtggagcatgacgcatgtcaaacatgcctacttaggtacttagaatcgaaatcccaataggatataatgctgatccccgcagattagattgtttggttctcaacgtcatctgacgtcattttttaatataggtaccagtggatggcaaagcaataaaatcaaggccaggcacgctcacagtcgtggattactttttgtttcgagctcttctttcctgataagagcacccagttcggatacgcaccgcaatacagtcccaacagcgtctctcctcgatataccaccagccaaaaaactacgcaactcatatctacatacccaccatgccgtcaatgcacgaacgtattcgcgaggatctcctcaacaaagagcgtgctctctggacagctctcacatccgctgatccagcaccagccatctggaaactcagcaaccccgaagcctgttttctattccctcagatgaatatcatcacgcttgaggacgaggacgctttcaagaaagccgtccgaccgccctttcatcgatttgacgcctatcagttcgaggaggtacgagtcataatcgtcgacctgatggccggtgtggtcacatacaaggtgcgcgctatgcgcgggaagaaagaatatactgcctcgggctcgacaacctggagtcaaggttccgatggcgagtggacgctggcttgtcaccaggaaactttgatgtgagaggattgtttgtgtcgttgtttttgtatacacccggtttcttctatacctttcgcgatgcggattggggaagggaatatgatcttgacgagcggcgaacgtctgttttaagtgatatgatgcaatgtatcacgagtcaacgaatattttaatgccatgatacatgatcaattttatgtgaagtcctaggacagttttctagtagataaatgggggtttaagtgttggagtggtcaactaactagcatgatgattactagtgtaaatagactgcgatctacactcaaaactgtcggtagtcagactgttcctatttaatgacagtaattgcaaatttattgcgatcgatgcatattgtattgatgttctcctctgtggctgatgtatcacgtagctcagccgtggcgcagtttctaaagcaccgactctcctttctctaccgacagattttcacaagccaggggtagtcatcaatgatcaagcccgtcaggcaagaaacgacccatgacactatgagagccgcatcaaacaacaagaatcacgagcatttcaatggcgatcattcacttatttcaccgtaggatctcccgaatgcaacaaaaacaaggcctatcatgacccggttcatgaatatatgtctgtatgaatcgtttcaattcttccgatcgtgctggatcatcgattgcgacttaacgtctggttcacccagtaagcacggcgctactatctagaccgcactcgtcatggtcctggcaagtcctctgatagggtctcatgagtcatgctgtttgtgcgggcgcgaaacgtgcctggctatcatttggccttgcgggcgcatgtctggctctttgaaactcactatgacaacttcatgtaactggcggctaacagtccacagatgacattgccaggcgattagtgtcaaaatgtagtgttcactctcttcaccggtcgcttgggacattctgttgccagcattgattgacaggtagtagtcctccgtactctagcggacaacgtttctgccgatgagttgggcaaaatgtacggcttcgtgatgattctcattggcataggaacatcgggccacctgcacagctggcattctgttcgatgtaggcgggtattgtgtggcgtggtcgagagtgcttttcgggttggatatgatcctgcgatgccagatgctagagcggtctacacataccagtgaacatttacggagcgggatgggcaggattcagagaaggaagaattttcgacaccatcgcctgacgcagatccacaggtacataaacagtcaggctgtatcggaaaaacgggtataaaattccatctatgccaatgtagcaactgtcacttcgttagtgatgtcgttggttatttctgctacaccattcgaaccgctagcttcggcacgatccttctgcatgtccgcgatgtgttgtacattgcatttggaagccccagcctccccgctggtttgttgtttgccgctttccagggccagggccccgcggtattctgtcgggtggctgaaggatcaggtggggactcgatacccgatcacgatcgcttttgctgttttaggatgtatctttaagatggtaaccggtgttcctggggaggaagaagttctctaggctcgccaagaaaagattgtttcgagcatatggcatagctatcacgtgcatcgggtttgtgatatgcttcctcaacgaggtccacgatgagtttctttttttccgactaccacgttgggtaatgaatcataacggatttgcagccgttgacgaagatacgatggatccccttcttagtctcgttagctagagtatcttagatggaaggggataatgtcggaatattagatccgaatggcgattcttcggaagtaatgtctctagtatcagtgggacgctgtggatgttttgttcggccgattctaatagtctctcgagtacggagtactccgtatggcacggagaaaatcggatatcacaggataaattgcgtattggcttcgtatcccctgtctaacttcttcatgtctcacgctaacgggcccagcggggatatgcggaccatattccctcaccgcattccatttaaaattgtctgcccgaacgcgtcagaggcatcacacgcctctggtggagtttcgacgtgagaaccaaagaatgggccatgtataagactattgcccaagtttcagcagttcgtatctcggttagagaaaagtaaacaaagaaaaagactaaaaagaccgaaaagggaaaaactcaaaatatcgacaggccagatttcctaagcttagcgcaacaaaaggaccgaaagagggccgatatgcacagaagcttaaatggggccattatgaaattgaggcatcacaacaaagataaccccagactcaaaagtcgaaaaaaagttggacgttggaaagtggaactgggatgtgtaaatctaaataactggggcgagtggccttccaccggtcttctagtcgttcgccaggccaatgaagacgaggttagggaagatacactccgccttgatcaatcccgtgtgtaatccaaatactgtaacatggatttctgcactcgggcgaccggaaattggtttttccatgaaaaatcgtggggttgtctcctacttggtaggctgcatcccggtgcagaattttcattacggtattcattgaaaaagtcgcgtattttatctgcggatgatctgccctaaatacctacgggatttgtgtctcccggacgtatcctaaggctaagacaaaagggacaaacggtgctgtcaattatttctccgtccagcgggcccctgccgttcttagtttcccccgagctcctttcccatttgattcaagactcatatttcctttgattaaacatcccacggaccttctagtattcccccagactcagcgccactcgccaatgcctacccagagtcataaaacaggcgcagtgagatgtgaggtatacactcggatttctgataaccatggttgtgacgtgaaaccttacctcggatccacggattggcaagccgaaggatccggggcaaaatctttagaggcttctagcctgcccgttagtttttttaggtgcatagtctatactcattctggatgcgaaagccggaatcgtcagttgaaaaaaattctgcgatataagctcatgccaagagaaattccctcacggtacttatctctctgggatcttgacacacacacacctccctactcaatacaatggagccaattcgtcccccacagaatattgccattatcggtgctggcatcgctggtattgcctgtgcattagccatatcccaggagctttctcctttcgtaccgaatttgaaaatcactgtctacgaacggcatgatatactatcgacgtccggcggtgccatcaatctgacccccgtcgcccaacgacatctcgctcggttaggcgtgctagatgagttggaccggatggggaccgagggtggtgccgatgtcgatgccattgagcttttctccatgcgttcaggtcgggcgatcggctccatcaaattcaccgacaaccaaggaaaggggttcggcggatacaagggccgaagggtcatgcggattgctctctccgtagccatgttgaccgtggtggagcgggctccgaatgtggagattgtattcggcaagaaggtgatcgatggcgaggaattcgaggatagagccgtcgtacgattccaggacggcaccgaggcggtgggggatttgatcatcggctgcgatggcgtgcactcggcggtccggacccggtttgtggacgtcggccggtctgctgagtacacgggactgtcattcttgcaagccacaattgactcggattcaatttcatcgcccgctcacttccgcacatcatcgctcaatatctcgcgacatggctcaatgcttgccagctattgtgaccgtgattccgaacagattttcgttgctgctattgttcaatttagtcgggaagcgctcacccgctatcgactggagcccggtcaggattgggccactcagaacaaaatccgctgcgccctccgtgcggaggtaagagaccgtttcggcaagtgtgccattccctgtatcaaagaaattatcgagagcaaagcggactggatgctttatcccgtatatcaagttcgccccggaggacgttggtgcttgaatcgagttattttgctgggcgacgcggcacatgcggtatgtcttaatacaacccccctgtttgttcttctctaatggattctacagatgcccccgcgtgatgaatcggctgcgtatgcactagatgatgcgatcttgttctcacgaattctgtcaacctatcgttccgagcctctgacggaggttttcgacgcatacgagaaacttcgtcgcaacacaatcaaccatgcattcaaagaatcccgtcgtatgtgggcacgaaaccgcgacatggggttcttagagggaaaagtaaaagaatggatgatgtctttccatctcagatccaacgaaagttcacgtgaggccgcatgggagttcgacgcaactaagattgcccttcccacaccagcacccagtgaagacatagtttcattgagttcatttttgagagaccggactctatgaaagaagaaaatacaccaaaatatagcatttcacaggactgtggcggagtttaggttggcctgcatggacgtgagcgtgaatcattaatggatacccggcaattagcttcccaaatattcaatagtatacctatttcgatttttctgcagaacccttgtcttttatttatgtcaatgctttttttgggttatccccatggctggagtcacttagatacactcggctctgggacggaacaggctctaccttggtccatcccgatctaccaacatagtttaagttgaaatttcttttttaccttcctcatttattcgccttgcttcacttacagaatttttaaaccaataccggacagatggtgtaaacagatatagatcagtcattaggtggactcccttgacaagtttcccttattttctggagctcactattgtgaattgattgagagctattctgctatagaggaagatctcgaattgtgaaatccggtagactatgacacctacggaatattatcgcaagcaaagaaggtagatattttcaagagactaaactgcaacgaaagacaaaaaaaatacacacaaaatacacacaaattgcgcttctgacaaagcgattccctatttgctacatagtttctccgatgttcacttagaaggtaagtgtctgaccagcagtgccaacaacagcagccttgaccttagacgagccaagcaggctgtagctgtagggaaccgacttcagggttccagctgcggcggtgttttctccatcaccgaagtcattgccattggcgacagcataaccagagtcggtagagtagaggggcttcttgctatcaacaaaggtgtttgactcaactagaagctgagcgccatcgcgggtgttgatgccgtcggcgacgtccaggtagtagttgttgtagatgtggccagtgccgaaacggaaggaaggaccacgcgagttaaggttataccagtagttgttattcagggagacacgcagatgaccggtgtcctcggcgctgttgctgtccgagtgtccgatcagggaggccttccagtggtcgtggacgaaggtgttggacacagtgatgaagtcggcagcgtgggtcagcttgttcacattagcaatctgtgaatttttctggttccacatattgtgatttggacttacatcgatgagtccgtcatagtagtccttgtcgtgatccaagtcggacgagacatcgcagtggtcaatccacacattggttgatttttctaagaccagtcagcctttctcaatttcctagagaaataaatatcccgcagcataatgtactcacggacaccaatagcgtcgccgttagcggcaagcaccttcttcacacctaggttgcggatgatcacgttgctctcttctttgaccagactatattgggtaacaattagtatcatctcgaatccacgttaagaatcacaacatacaggccaaagctggtcaagacagctgtcgagtccttgccaaggatgctagtattgcttccaacacgaacttgtttggctacctgcgtgatggggccgctcacaacgacaaccttggcagagtcgcccgaaactgcggctgtgaaggcagcatacgacgagacagtggtagtagtgccaccagcaccacccttagtacctccgttctggctggcatagccgggagcgacctaattcggagtgacgttagagtgttgatcgtatggtacctgagcgaatcgtgcattgatactcacatcattgacacttgcgcgctttcccagattgctggttgcagtaggagctcccagtgcaaggctggacaagcagccgagcagagaaactgccatcaagttgaaaggggccatcatgaatagaaaaagaaatcttaaggaatgaataggcggactgggtctccagtatgctttgctggagtaagtgagtgttgatatcagagcattgagagtatataacgatgaccgaaggggtttatatatgtaccacccgatagctctactaggctataggagcttctgaaacacgtcacatccaccaccatcctgatcgttgaagaatttcccgtgctggataatctcttccagtccggccgaaccgaagatttaccgagatgtatacgacggcattaattctccgacgcgtgaagtatcagattgatactcccaggacctcctttgtgaaagccaagatcacatcatgtttcctctaagacacaaagcttggcatggattgatcgaagtcctaaatctggaacggacttgaaccgtttggggccaagtccggacaacccgtgtacaccctactggatggagccccttcgaatggagaacagtcgtcagcgatgagctgcttgttgatttattcgctgtgccttctcaccggaagaattccacaaatggtttgaaacatcaggagttcttgccaagagttccggggtttcaacaggatctcccgatcttggcatcagaagcgtcaagggggaagttatatttccatcaatcgtcaatcgacgagtttcggggtatacgccttaattcttttattggagttcagagttgaccaggggaaattagcgctaggattcttttgggatgttggtggagggttcaacaatacgagtaaatggcgtgatcgcgttggttaatgaaatctttgacaacctcaacgtccagatcttcagatcttccacatatccaacttagcccaaataagccctgggactctatagactatttctcatccaagttattcccggggttatctggtaagtaacggtctcgcggctgagtaatcgctgttcttggatttgcggggaaagcgaactgcgatcaaaaccacctcacttgatcgcaataggcggaatgacagagacattttcatccgtgccgatcgtcgacttcgctcggctaaacgatccttcaacgaaagatgaggagctgtcaaatttgcgtcaagccatcttcgttgttggattcctatacttgaccaacacaggattagaggtgcgagcgatcaatgcgagtgaccgaaatatgctaataattgagatagagcttaattaaacgtacccatgaaaatctacccaaactatttgccctatcggccgaggccaaggagaaatgcaacatgattaactcgccatcgtttcttggctatactcgcctcggtgccgagaccactgcaaaacaaacagacctccgcgaggtgagactatttcttttcggaacctggtgcagttctcgggcactgattttccgattttagcaatttgacttcggtacccctggcgtgagaccctggacagagcaggaccccttttggcaacggcttgaagggcctaatcaggtaggttgccctctttgaacgcatgccctgacgactcactctcaatagtacccagattatccaggcgtgcaagatctggtcgaagaatatatcgcgaagactgatagcctggcacaggcattcgtgcgcctcgtcgcagaatgcttgtccctgccccgggagacatttgatggcttcaagggtaatatgagccggctaaagtttgtcaaatacccacccgcagtgcaaagctcccagggtgttggccctcacaaggactcggcgggtcttttcacatttctgtcccaggacaacacaggaggactccaggtactcaacaagaacggagaatggattaacgtgcctcccattgagggaagtcttgtcgtaaatatccaacagggattcgaagcgatcactggagggatttgcgcagccacaacacaccgggttattgtatgttcacaataccattcatcactggaggacctttctaacatcttgctattcctaggcgcccacttctcagacgcgttatagcatcccgttcttccagggtgtgagactagacttgacgctaaatcagctgaaggaatccgctgctcacatcgtgcaacgcattccagcctctgacgacaagaagaagcgagcagttgatgtgcctagtgaattcctttctcctttgtattcttgcgtgagtggttttgttcaacgattatacgcatgggactaacggatcatagttcggcgaggctcacttgagaaatcgcatcctgagccatccggacgtcggccaacggtggtattcagagttgtatgcaaagtattctcagcaggtcctacaatagtctagggaattgaacgttgacaatcccgacacggtaaaacattgaattggggtttcaacgttaaccctgactttggggaattgccatatcctcgcctacggctttctctgcgtacaaagttcgtgttgtatcgtagtccaggctgctttcagtcaatggaatttagcattcttatttttcttcctggttctattccaaatataccaattgagggctgtctatatggtggaagtgaagtatatgaacatgggcttctattcaagctttaccacagtatcacctttgcaagaattatgcctagacaaaggctataatatcgtgtgaatcaaaatcctggtatacgtttctgcgcaaatttgaagcaaaatacaaaataagccaatctttcgaagcaatgtgcgaattcttaccgacttcagttttatcctcgctttgtgtaaccgcggggtaaatcttcgtgcccaattcttccactttcatgttccaaccatgcccgaaatgaatgctacagcactcgacgctctccggagccgtctaaagactgcgactatctatacacctgaatcagagggttacaaagacgttttagtccgctggtcgaatactggaatgaaatatgcggtacggaaggaacataaaacataacaaacaagatgaccgactgataagttgcagggcgttgtaatccaacccattgacacgcttgatatctcgatcgcgctgtcctgggcacaacagtacgatgttgatcttgctgtgaaaggtggaggccattcaacggccggcacaagttcgagcgatggtggcctggtcattgatctgtcgcgcatgaaccaagtgacggtggatactgagcggaagaccatcaccgcccagggtggagcaacctggaaggaagtcgacgaagccggtgcagtccacagtctggcggccgtagggggcaccgtaaatcacaccggcgttggaggacttactctgggaggtggctatggctggctgagcggacagtatggtcttactattgacaatctcttgtcagccacagtcgttttagccgatggtcgtattgttactgcatctgcgaccgagaacgtcgacttgttttgggggttgcgaggcgcaggctacaactttggcgtcgtggcagacttcacctaccaggcctatgaccagaaggatccagtgtactccggccttcttggattcacttcgggtaagctcgagggagttatggatgcactgaacaattccctggcaaaacccgactctcgctttggtgcgatctgtatctttgccttggcaccagatggatctgggccgatgatcattgtaattggcttctacaacggcccactcgaagaaggccaaaagagattcgctagccttacagctcttgagccagttctgaacactcttgacatggtcccatactccgtggtgaatactctacagaacccccaagcgacctatggtgatcgaaagtctttcaagggaattttctacgagccgccattggatcctcactttgcgagagtgatattcaatgatttcattgccaagatccggagtgaaccagatctcaagacgtctgccatcattctcgaatttgtcgacatgcgcaagatttgtgaagtgccgctgactggaaccgcgctagcaagccgaaatcctactcagaatgggatcatctatttaagatggaccgactcatccaaagatctagagcaccgcacttgggcacgagaagttcagtccaagtggaaagtgaaattggatgccagaaccaaagaccagggtgtggattcgggcgtgcctcagtacatcaactatgcagaacgtgagtctgattgacagaacttgtccctcaatatatactaacatcgtacacagctggtgactcggtggtaagcaatatctacggcgaaaatcttcagagactgcaagaggtgaaagcgaagtacgacccaaagaacgttttccacaaaatgcaaccaattccaatgggcgcagacttgaaaaagtgaaaaaaaacgcggctattggctggcctaatcatttctgagacatttccgaacaatctctgtattatctttggtatctttaccatcctctacgagaggacgcaaagagatgggactgcataagaatggcatatattgtaggaatatacagttttatatacagctaggagcgtcaagagaaacaacttgaaacctagataatacataaaactcaaagccgtggaagaatgtgatacttgacagcctttacagtagtccaaccctcgagagcctcttcgcccatgtctcgaccaaatccactttccttcacacccccaaatggaacattgggactgagcatcgcccacgcgttgacagtcacttgacctgaatcgagttccttgatcacacgatgggcgcgattaatattgttggtaaagatggcagcactgaggccatgatgggaatcattggctttgaagataacttcctcctccgttataaacttggcgatactctaatttgtgccttgattagtattcaaagtggcagattcttgcatggaagcttgcttaccgcaactggaccaaagatctcctctcgcatgattgtcgcattatcaccaacgtccacaaaagcagtgttttcaacgaaatatcccctgtcacctatctgctcaccaccaaacagaagcttggctccagattgctttccttgacgaatatagtcaagaattttctcatgctgcgcacggctaacaactggcccctttgtagtggaagcatctaatggattaccggcgactgtcggagcatcagcggcggcttttttaaaagcctcgacaaatcgatcataaatggtggcctgaacgtagatacgggatccagccgcacatatttggccattattggctgtaattccaatacgagtccagaggagtgcattttcaatatcgcagtcgtcaaagacaatagacggccctttgccaccgagttccaggctgaccttctttaggttagttcgcgatgctgcttgcaaaatcttccgccctgcaagcgcactaccagtgaaggcaatcttgcgtacatccatatgttccgacagagcctggccggcgctggcaccctcgccgggaacgatgttcacaacgccaggaggaatctcggcctctttcaccagctctgcaagtctcagggcatatagtggcgataattcagaaggcttgatgatcaagacgttaccagtaaccagagcaggagctagcttccaaatggtgatcatcctaagaacatgttagacgtgaatgagtcgcttggactggtaagcttacagcggagcattccaaggcacaatcgcgccacagacacccaaaggctcgcgatgggtataggcaatgccaccttccatctcaagggtcttaccatcgatctttcctgcccagcccgcgtagtatcgcaggcagccgaccgcctgagggatgttcattccgattgaatcggtatacagaacgcctgcatcaacggcttccagggatgccagatcttccgcatcgcgctcgaccagctctgcaagtttgagcaatagctgggctttgacaggtccgggcactgttctccacgttttgaaggccgacttggcggattccacagccttgttgatatcctcaaggcccgcggcggagattgttccaagttggttgccggttgatggattttccacaactagcgtttgaccggcagaggagggaacaaattcattgtggataaagagtcccgtcggaactgagagggttagcaactgttgcatctagggccaatatagacttacttgtaatttgacggccctggacgcccgtgacagtcaaactagaagacatttttattgtcaacgaatactagattcgcaacttctgtcatagcgcagactttcagatgacttttgtatctgatctcctcggaacgttccgtcccgcggaaccgtcctcgacccggcccgaggtatgtggagaccgatccccaaaagaggggataatgggttgttgggagtgatagtattctgattcagatcctcgagattgaggagagaaattacaattactgaaggccacctctaaggtattccctttgtgtgcaatctgtgggtgtgctttatcttctaattgagcgtaaactagagagggcggaaagccagaaacgtgacattctcgcgtgtgtaattatcgaaacgaagcatcgtagcatcattccccaatccgaccggactcatcctatgtatcgtttttttttttcgaaggtggcaactgaatagtaaccgtaatggacgaagataaacgatgcaagactggcctatattcgatttatccgtttaatattaccatactgacattcctgacccctgagtgaagtcttaccttgataacccaaagactggacggaggaactcacaattatgtcatctacttagctttccaaaaggcccatgctaagacgagcaagcccttgataccggccgataaccaaagaataggagaaatggctccggtgaccttggtgacccatccgccgacgatggcgcccacaagcgtcaacacaaacgcgatgattcgccggtcgcgtttcacattcctcacaagaaacagttgagggtccgacattagatcgcagagaagactggtaatcaccacggtcggcatctcattgaatcccaatgcacggctcgctacgatttgaccggcagactggagactaagaagaacaatggggatttcctgatcccatgggggtattgtctccgatcctttgccggctagcgtgctagaaacggcacctccttgaacaagcccagctgtaagcaggattatactagcctgtaacaggaaagacagcatcagcgaccctcgccgccgagcacctaggatgcgatgtagacgtgcgaaaatgaaggatccaaggatgaaacagccgatggacgtgagtgagcgtgcccagccatatggacgaaggttttggtgcgatgcacccagcccgacgaagatcgtattccctacataccactatgattagtcgaccctggcttggatgggtgacgttgtaatcttacctgtttgcatagacacaaaagtgttgtaggctatacatgttagatattccgcagttcaataaacggacctggtcttgttcctacctctatatatcgtgctatccacaagtcccgaagtcaaacaacaagcgaaaagtaagaggtcagcatgctgtggctcgagctcagccttcagagatgttgaaagtccaccgaatgcacctttgtcatggttcatcttggatgttattgactatagtgagagagaaatgaagggaaggatgaaaagacaaggagatacaggaaaccatcggaataaaatataattgacataaaaactttctcttttccgcggggattgaaggacgggtaaataaactatgagatctcccaacatttccttcccctcctctcccctggtcaatcgcatcatcatctcacttaattgatgcatcctaagacggagccaaggggcagtgaaaacccccgaagttccgttgaattctgaggaatctgcaggactcgaagcgagataaggacagccacaatcacatgtcgtgcatgacagcctgaaattcctgttagacgggccgcagaccaagccgacttcatactaatttagtctccgatgcatgcctaggatgccaaggaggacccggtgtgatgagcgttagttgcttggcggcaactttcttctccaaaattccatctgcaggcaggactcgtgtaacatgagttctcatggaggggttgatgtacgacccgctatccattatccccaattcttgtggtagccaagcgtctcaggggtttcagacacagctttccgataggaccataccagagacgtcgaggccaagacggacggatcaatggtgcatattgctgcagggcaagcccagcaatcaaccctccagctcagccttgagcacatcaatatccaattctgccataaccccaagcacgacacccagactctccataaatccattgacagaaacgcgcagcatccggttggtcgtcgccatgtatgttattttcaagacggttttacactcgtcagggtcctgtttttgcttcttctcttgcggctcggatggtgcttcgaccaccggagttccgagtgtgaaagtccgtcgcacaaaaggggatagttcggcgtcaacttccaaagcgcgcagagcgcatgatgcgagatgattgcttggaaggggaagggatattgtgctgagtcaagaggtgagtattgcttggtcttgtttttttgggagctatttcggggtggcggggggcttacagtgagtaagggaagtcgggattggtgggttgtatgagagccatgataagcgtaattcagttgggaaaagcgaaagaaaatagtccttctgaattccaaattgcgtcttccaagcagcagggatagatcagttattggagtggtgaggatgatagggtggaaattggcgatgcactcggagtcctagaggaggaattccggggggggaaatttacatggctgactcagctccacggcgaaagccgaaaggagaagtcttaacttacctaccttggcatttggtgtacacactgcacaacagtacgcgtggattcgctacacagcactacaatagcaccttttggtatgttttcgggtgatgatcttctagtttgaagagcttggcgaaccacggtctttgtggaacggtgcatttggccaagaaatcatttggccaagagacggtgacccgatatcgcggtgcagatctctcctgtgagaaggatgcaaaatgcactgcatcactttgcaatatgcagtcaccttgccaaggtgctcggattgattaaattgatgtgagaagcaagccatctgagtcaagattgtgggtcgagtttcccgtcgtcagcctatcccagtcaagctcaaaagcccgaagtagacatgcattatctagatcttggctctctatacggagatatatgtatgcaacgctattgtggctctttgattgatgggaaatatgaacacctgctccgcgactagcgctcttaatcttgcgcaatatgtcttcttcgtggactcactcagctgaggtcatccaggatcagtacgacgcgaaggaagataagccatcaggacgtcttggcagatggtggaatgttacatccctaaggaaccaagacttttgcctttggtgagatgtttttgtcctctacgagcaggcagacgcttctcttctgggattggtgtctgcatgtagcaaaattacttgcagggtatagaactcgaaaatataaagagcagcgttgtccttcgactgtagtacaagaatccaacggtccagactcaaacacatctcatttgccaaagttcaaacatgactatcacaatcaccgtcgagaaggatggatactacgaggtcaatgggacccgacaggaacctactgtctctctctatgtgattcccgcagcttccaagttgcgccgcatgctgaaagacaccaaagacctcatcgtgtgtcctggagtatatgatggcctctcggctcgcattgctatgcaggtcggctttaagggactgtacatggtaagaactctgatgtgtaacaccacatccctgtataatgtatgctgaccaaactacatagactggtgctggaactactgcatcgcgcctgggcatggctgatctcggcctggctcagctccacgacatgaagaccaacgctgaaatgattgcaaacttggatccatttggacctccattgattgcagacatggatactggctatggaggttagtgactcaggaacactagacctttatcatttagttgaaaagcattctaactctctttcaggtcctttgatggtgtcaaaatctgtgcagcaatacatccaggcaggcgtggctggcttccacatcgaagatcagatccaaaacaaacgttgcggtcatctcaatggcaaaaaagtcgttagcctggatgaatacataatgcgaattcgtgcagccaagctgaccaaggatcgtttgcactcggatattgttctgattgcacgaaccgacgcactccagcaacatggctacgatgagtgtattcgtcgactgaaggctgccagggatattggcgcggatgtcggactacttgagggttttacttcaaaagagcaggcccggcaagcagttcaggatctggcaccttggcctcttcttctcaacatggtggagaatggagctagtcctctcattaccacaaaggaggcggaggaaatgggcttcagaattatgatcttttcattcgccacgatcaccccagcttacatgggaatcaaagccactttggagcgcctcaaggcagacggagtggtcggtgtacccgaaggattaggaccacgaacaatcttcgaggtctgtgggttgatggattccatgaaggttgacacagaatccggaaacgacggttttgctgaaggggtctagtaactatttagtaactagtatggatatatgcatgattttgcatcggacaagcaacggagtttctatagctagatattcaaattggaagcaatggtcgtaatatataattccccgcataagccaagatcattctaaatctcaatcaagtctgggttgccttcataggattccatgtcatcgaccatttcaactgaagggatcactggtggaatctttttcacaatctccttttcaattgtcgaccattcgcctttttcaacgattttatataatccaggccaaaggctggcctgaacaaatccatccgaggtatcctcctctgtgagggttcgcatcttcttaccccggaaccgcaatccgtattggtaactaccccagaaaacgtatttgtcttcctggcaatctaatttatgtttgaacttgatgcagcgcgcgattatgccgtgtagctgttgcattcgctttagtctctcggtgacggcgtagcgaccgaagcaggcctctgccttctcgatgatccaattacactgttcttgtaaactagaggtttccaatgataggattgcagagctcatcgcacatcgccaatgtcgggaaatgtggctagaaactgttgttgttagaaagcgacgacagtagtgatcctccggggctcacattgtttatttatttcggaatcgactttgcggagataattactccaactttgctcagctccaagcataaattggttccaaaagaaccggtaaatcagcccggcaatttccgactgaataacatccaatgacgagatgtcaaggctatctgatcttggcgtgggatcgttcccttgttgggctggctttgctgcaaagtgggtaaacctccagtgctcaagatcgtgatagagtagacacatctcttgtttggcttcttcatcagagaaagtctcagtcccagcttgtaggcttgctatcttggtcatgaggattcggttctcctttctggctacatttgattcccggatggcattgtcgagcagctcgcctctttgacgagcctgctcctctgcaagcagccgatctcgttcaaacgtctctgctttattttctgcgattttgattcgctgttttgttcgttagataaaaataaggtagaggggccttgaccacaaacctctaggagccgttcaacctcatcacgcatggacttattatctaggtaagctaatccatttagtagataccatttaagtcgtgacggggaaagcgaaccaatagcaacctgtccccatttggaggataaatctggggacgtttgagtactcctgttcgcctgctcaggcttgggttcgtcgaaagggggccacattgcataccgatagccaagtgatgggaagtatgaaatcataaatggaatagtttcaattctattcatgacacattctccaaatcgatgacaccacaattagccgatgttgtagacatatgcctcacgccgacgctctttacggctaagcgtaggagtcaatgatctcaaagttgcgaaatctaactttcgattgaagaaacatcaccttgtctgttaaaaaaaattccatcttgtactctattttccgaaatttgataagaaagacaagacgtacaaattcaacatggcgatcgcagatgagcgaccaaaactcatagtgggtgttgacttcggaacaacattcagcgggtcagtaaactttctgttctggtagtaattaatgaagcgctgacatcatttttatagcgttgcctggggattggaagactgccctgatgatattgagctcattcagacatggccaggtggtggcaacagtgagtctacgggacaaaagagaagttcatgaaactgactgttcaatagtcacaagccagaaagtcccaacattgtgttcctacgacgacagccgaatgcaatggggttatcagactaaccggtcaattcatccgggcaaggagcagcgactcattcaaggagtcaagctcttgctagatgaaagtcaaaaattccgctacgcacctgctgctgactctcatgaaatcatcaaggacatgaaaaaaacaccaacggaggttgctggtgactacctgggaaaattagtcggccacgctcatgatgtcttgacgcgtcgctttggtactgccctgcaaactatggacttagaatacatccttactgtccccgctgtttggtctgataaagctaaagatcttactatgcaggcagctcaacaggctggcatatctgctgcgaatttgagactcttgtctgaaccggaggcggctgcagtctgtgcaattcggacaattcaaccgaatacaatcgcagtatggatctcatcataatgaattggagtttaataatctgataagattctaggaagatgactgcttgattgtctgtgatgctgggggtggaacggtcgtgagtctttctcgtatggaactggtttgataaattttagtgacactcatcttaggacataatcacctatcgcgtcaaacagagcgacccgttgacattcgaggaagccacaaagggaactggtatttatgggaaatgtacacttttggttatatctaacaaattctaggtgctgtttgtggctcagtgatgttagacgagagatttgacgcacttatcaaaagcatcatcgagaagcagttgcataaaccgctcccccagtctactgccagggctgcacgaaagtattggcaagactacatcaagcctgggtatacaggtcctctcgacgacgatgagatgtgtgacgtaggatattgggtcccagttcctggagtatcgggtatctcaaatatcgagctcagtgaggggcatttatatctagacaggtatattggatatatatatttacttcaccaacccattcgtgggccacactaattcggatacagagatcaagtgaaaggcatcttcgatcctatcatcaagcagattgagaatctcgtcgccgagcaaagaacgagcgtcaaggtagcaggtctttcgacgaaggtgagaccctaaagcgctatcaaaagaagctcaattaattccaattaggctattattctggtcgggggccttggtgcctcggggtatctcttcaagcgtctacaggctgctttcaacgacattcaaatcatgcagcccccaaatgcgtgagttctcaatctttcaaaaagtcaattcaaaacgatactgatataaaaacaggtggtctgctgttgttcggtacgtatctgaaacattcataacgcttgttttgtatctgacagctcaggggcgcggtcatccgtggacaagaagggaatcaagtagagacccgcattgcccgatgcagctatggaatttcaatgaaaatcaagtttaaccccgaaatacaccgcgcagatgagaatctcatgtggtgtccatatgaagaagtatcgcaagtgcataagcgcatgagatggtatattctcaaagtgagtaacctgccacatctactgggtatttttgaagagattttgagtgctgacttgagggactttgagggaaaccccgttgccgagagtgagccgataagaatgggcttctaccgtgtggtcggccttgggcaacctttggtatttcaggactcattgcagttttgccaggggaacaaagcccccgaaacgatggattccagtatgtcccgtgtccttatattggcaatatatgaaagcggccttttactaaattgaacaggtgtcgtgaacctgtgtgaagtggaggcagatctgagcagaatcccaagggagctttttacaaagaaaacgaactccaaaggtaacgaattttaccacatcgactatgatttggttctaacgccaacttccgcatcgttgttgttcgacctgcaattcaacggtgtctcctacgggagcgtgagatctcgctattgaattccacaacggtgggctaggaaaggtatgtttagggtagctgatttgaaagggacttttgcctatgataaaacgtggctatggttttcgcaggctcaatacttgatcgcttgagattggctcgatgacataattgagaggaccgaaataaatagttagctagcaatgcaaacttgatatgcgccttccttgtgatgaagtgtagataaaaatgtgtattgaagaggattcaagtaagtccaacaacgcaggctgctgcagacgaaattcgaagtcaaccttccctgctaccctgaaaaacagccaagtgttgcaagcccgggccttccaaaatatccaagggggccacaaaagccatctgactccatgagaaatttttattctttccgccatagataaacacttcaaagcggccgacaaagtcaccatccacccacacgcgacttccatatatctcatttgtagagatagtgacttgtgatttgcgagggattatgacagtcttgtgggttgacgtggtcttattaacccaaattcttccaggctggtcttcgtcaaaaccgtcagcctcagcaacagagcgaagtgggtatggccatccatcagaaacaaaagccaattcaccgtccgatgataacgtaagtgttgcatcggaggactgcaaagaaaaaggacccgtgacgtttagttgaagggtataatccatgcccttacttccatagccgaggttatgcttatcctggctggtagttggccttgtccatgaaagcaaagttcctgatccgtgggccctttctcccggaaggcggcggtcgagattttgccccacagcttgagaggacaattgtgcgatggatttggccaaggttggttcatgcaagggaggcccacgcgcaccacaccacactcgcgaagccacgactgggatgccatcacgaatggcatagtaggcctcaagctgagtagtggcatccgggccactgtcattccaggcagccaagagagcacctagtacagcttcggtatcgggttgttcagttttgttcaccggattgaagagcccaggggtccactgccatccgtgctggtcggcgaagttcagaacacgggcgttgttgaaaaactgaggataaggggctggggtgataggcacatggttgcttttcagcgacatatatgcccaccaatcctcggagttgatgatctggtagccgttttgggctaggtcaactggatctgattgtccatactgccagtgttgaattgtcacattcttgtcaatgggaatgtttgatggctcatatgtcccccaaatacgaacacttttgccagaagctgcttgtacaaagcgagacatctcgttcacgaactcaacatagtcatccgcaaattcagagtcgtactcatcggcaccgatatgcacctcctttgtgtggaaccaaggaagaaattcggtccagatggacttcatcaaaggaacagtgtccggatgcgagagattgagcaggtccctcgactctaacgcgagctcaggtctccatttcgtaactgtgagacagtgcccggggctttcgatctccggtatcactgtaacacctcgctgagcacaatgacgctggaaatcatcaaactcagcccgggatagcgtttcgttggcacgctggacaagagggcggagggcctcactttcggggtgcaaggaaaactgcgagtagacctcgttccaggtcacgtttcgaccgcggctcagcggatagttgtcggtcgcatggtagtgaaactcggataatttgaagaacgaggcgtaggtgcataaatctttcaaaaactcgagtgaataccatttgcgaccagcatctagcaaaaatccacgagtcgcataggcgggtgcatcttccacgcgaccaggctgtagggatgagcgtgtcaaaacgagttgctggaggagcgttcgcgttccccaccacatacctcgcgccccggagcctcgaataaatacactgccatcttgtatttccagctcatatccctcctcggtctggcgtccactttcgtacgtaaaccggtcgggatggtctgtgcgcccgagaaatattcccgacgcatgtttgggaaattgcttgaccgtccgaagctcccaggaactgttcgttagctcctgtaaatcatcgcgaaacgtgttggcaaagtcggatgccgatggtggaagcagcgttaatccattctgatccttccagctagcgaagtcggcacttaggtagattgttcggtcggtggttgctaacgaaaagcctttgttatgaccagagccagtgttgtcaaagtgcaccgggggtaggatctgcagcgcagacgcgactgcggcaagtgagaggacaatccacttcatgtctggacattgtgatattggttacgatgtgagcccttttatgcaaagcaagggattgtatcagcgttacattcctgattgtacaggggcgtgggggtagatgttgtggggaggtggggaatttttatattggcagagtggttgttgtggatatcctacttatttttcatcttggggtatagataagaaggttgcattaaaaaacttaattgactattctttctttcctgtcatggtaactcgaagcatgaaatcacgcctcgtcgaagccatgctgaggccgagttttcatctattgattctcaatggcatatgatgcctgtttcttactttttattagtatagatagatctcttttgaccacttagactccctgtttccaagttagagaattacaagaatggcctcgttatgtcattttggtagtcttttagttagtcttcttaaaatatactaatcttcttggtacacgggacgggaaagggctaaatttgtgaacctttcctaggtatgtataaccttagatatgtggtcaatatctctttctgatccttttctattccagccgttgggtgctactgctaaatagtcccacaatagcctgctgacagcttttcagatgtttaatcgtattcaaccctcctcgatttctaagggcagtttccaaccacacacaggcccatgtcatattccataactcgttcaggagaactcatatcaaatttgcactcgttacacctcactccgtatttcctcttctttcattcttccatcaagaactcgcgttttctacgtagctcacgacaatctcattaccacaacgaaaccgaatacacataaaaccgcatcaggccgacagaaataagtcaagtgagtcttagagttcaacggtgcttttgaatatgagtgtggttgttttcgtcaacagtttcctttagtagttgggcaaaatatccaaagtcagtgtctacgttgaatttcttccagggactctcggtttatatgggtattacaatggtagcaaagatactagagctcctcggaggggactacggggactctcgattagggcacattggggatatgtcacccttgaggtcactgattagcagtcgtaggacgggtttctcacgaaccacatcgatagccctagcagtctctaacttgcggtcatttatcggccactatgattgttctagcatggagtttggaccaaaatatccgtagaacgttcgacctcagttgactaggcaacgggccaagcgttgctccggatggatgaaacaaaatacgccctgatatcgtttcttttaagccgcgttggatacctactgttggtatagaaattttttaccttagtccatcccgccatttttaactctgatgctgttgttagaacatttgagatgtgcaagcatacacgaattgggcttcatccatccagcggagaaatcactagagacttctctttctgtctggaaaccaagatatggtttgcaagccgagcctccaaaccccaccgccaaccactgagaggatatagaaccttccccgtatgcggttactaaccagcttgggtcggcgatggaagatcttcaagcgcagggtgcctaagttatactaactccgttatctccccctcaccccgacatcaaagaaacggatatcataaacattaccaggtatgatttctttccatgatattcgccgaattatcagtgaactcccactaataggcaccttttcactcatcttcaggctcatgtcattttggtcaggcctcagccggcaatttatttatgcggcgatacctaaaagcctaggtctagacactgcgcagggccaacacgagaaattattgtatgtaatgcaagcatttccccgatgattcctccgacaacgaactttgggaatcattaatcaactgacacaattccttggcgagtgttacctttacagacggactattgttgcagcaagggcggaaagtaggtgtatctgtatccaagacatcaggaattctcggtagggatcgacaaggatcgactctacgccgaggaccatagaggaccttctcagagtggcgcagccttagcggtacatattttgcgctatcccttcaatgaacggggcctggggtaccccagctaattatttaaaattattagagttaagatctccctttcaagataaaaagttggcacacagccgtgacaacatccaactgagggaaagcctcgtggcatcggaatccccacttaacctttcacccttgccgtcgggccttatttttcaaagatggcgaataccaagactgtgagctgaactacacacctagtcatacctcctgtgtgttacaatatgttgcatctattcaaacctagacagtatcttcctatgcggtgaaacattcgactagatcatgacgacctaatggatcatcgaaagagcctaatatccacttatcagcaattgaagtatactgttcaactgcatccttgatctacgatgatcaggtggtgatgtcatactcacagcaaggacaatagttaaacgtggtttcaagccaaaacaccgcccagttggcgggctggccaattggaggtaaacgaatgacatccacttggcattatcatgtattgttagcggctccatgaaaagactgattttttttggctgaagataacaacagcaaggggagaatgtctcacaccttggcatataatattgctttttcgaatgcaaacatgtggttttattctccatttcctttttgtggatctcaacttctgacggccatgaaacctcccaatgtgatcgctattgcacttctcctttttgagttgggcgtatattcctgcagcccacatatccattacaaggagaatatgccaagattggacccgtcagcaccaggcagtgcctgagctgcggtttagtcaacgtacaacatacggggtacggtatggaggatcaaccttgtgagcgccaagatctagtattcgaggctgtgttatgagaacttagtcgttggcgtgcacagataagactagtggtgaaccattgatgccgccggagatcgttcttggcgactagtcctactgcagcgcttttggggccccggacggactagtgtcggtggatacgtcgatcccttggcaatcgaagtgtacccttttgacgttttcaggggccagaacagacaatatgtactctctaagacgccatctcaaccaggtaattgcatatcaagccgagaatcatagggcaggtgagtttaaataatccgatgacaggtcgcaatggtcccaaatttaaattcggtcgattgccgcgcgctgattctgcacatgtagccagtcaatgccataacgcataaccatgctgccaagaaagaatgtgaggaaatgctgcggattgctccttggaatcgagaaatcctaggaatcaggtcttgacggattccgccaggccacggtagatcctgaacccgcaccgtctaatgtcgtattatagtttgatttataatgggatctggggttgaattacgcatgcagcggagataattatagtgccaagataacgcccagattctgctaacatggatctgtgagatcatctcgttttgggatgatcatttctattgtggctactcactttataagactacgcatgcgatatgatttggttatacagtaatcgatgttatagtgatcgcatacacacagtgtatgtcgaatgaagagagaactagatctagattaagtagttcggttcccaatgtatccctctgcggtgtactccgtaacacataaacgagacgcgtagggatggggcaagtatcagtgtttcatctcaattttcttatctctcttggcgaggattcagcttattctcttcatggagaggatcggaatggatccgaaagatggatgagtattaaagaaagccaaatccgttgtgccattgtggcaatctatttctttccatattggcacagctacctttcaatcttgattctattcataataaacttatccggcttgaataatatatgcataataataatttgaacatgcatcgccagccgccttcctcgtcgggatatatcgagccactcacaacaccagcccaccgtgcccctgaccatcgttctatctaccaaacagaattaacagctgcaaattctcgttcggagaaccccaatgaagatttcaagtatacacagggtatttggtcttctgggggcagcacggcagtgtctgtctctggcaatcagacaccagaagacaacacggtttgctcaactatttcccgccacttccgagcagacatagacactacgcatacagatattcctcttatagtatgtggatttgttggtggcttggtagatggcctatcattcaatgcatggggcagcttctcaagtatgcaaacaggtatgtgaattctatagtcactgttttcccgtgcaaagcccgtaaagctaatgacaaacaacacaggaaataccatcttcttggccttgggagtctctggtcagcccacaaccccggcatatctgtgggcgaagtccctaattgccctggccgtcttccttgcaagcaacatcttattcgttcacatgcatcggctcttgaggccacgtcgccgctcgactatgataatctcatttggtattcagactattgcgcttttggccacagcaattcttatccagctggagatcatcaccccgaagcccgaggacccccgggctccgatcgaatggatgcaagtcctggcaatctcacttctagctttccaagcaggaggccagatctgtgcttctcggatcctggccctagatgaaatcccaactgttgttgtgacagctctgctatgcgatcttcttgtcgatccaaagctgactgcaaaattcaatccgaagcgcaaccgtcgagtcggggcctttctcgcattgtttttgggcgccatgaccgcgggtggactttctaagaccacgagtatggcgtctagtatatggcttgccatgggtctgaagttgacagttaccttggggtggattgtttggcgaggggaggggaggagaaagagtgattttgaggtgtgacttggctttgtttctttttacgtcgcctattcaaaaggcatgtacacgagcccatgaaagtttcaagtaactctttgtttgctttgttgaaatacccagttattttccgtcacctatcacctcaattcgttcgtcttctgtagctttcccacctttcaattttagtatctgatcgaaccactgagcacatgcgtagtattatatcgctcttgcttcccatcaacctcgttatcgcagactttactattgcgagacttgccgtccacagcacctgcttgcaagatctcacacaaacagctcgccagaccatcggagtcaaatccccgtcatttgtccttatcactccagcaagccaagtacagcagtagcatcttacaaccccgcgctcaaataattacctaaaagctcgcccatcagctagtctctcagtatctgcggcccagtctagcatgtcgtccacttcaaggtcaccaaccagcatcatactcggaagaggtttttaaatgtcgactccgacagggcaagaaatacagaacctagaagttttagtattatcactctttttcaatttttgattacctagcatatgtaataaagttatatatttaatccatattcgagttttagaatatacttcagggagccctctaataatattgtaattcaaaatttcaacctataagaatatcgactctgaaggcgtccataaaacttacccttcaactatataaaatcatttgcatgaatattagtgctatccttgacatgaaagatcctagtataatatagtcgatcgatgagcatttcagacaattcttgttttatatttaacatgatattgtgtaccatatctcgtacataatcagacatagcgcagaaatatatcgttgtttccacaagttcctgtggtatgataaggatgtataatcgaaatctagtctatgattttataagatgactattctaccggtacctgacagtacctttttttatttgctctcatccgagagaacgaagtggagaactccgggctgtccactggcgcgacccttgctctcggagacatagatgcacttgcggaaggtaaccatcaaggaatataagaagctctcatccttctgctcgtggtagttttcgccgagcataggctggatggccttggtggctttctctgcattgtagaacggaatgcggctgaagaggtggtggaccacatggtaatcaatgatttcatggaagaagtgacggccaatgaagccggtcgtgcggtcaatggtagccagtgctcccttggtgtaagtccaggcttcggcagtgtagtgagcaacctcggggtgggtgtgttggaggtatgtgatggcaactattgatttgattagttctcattctaggatctcaggtaagatgggaatgaaagacgtactcagccagtggtgaacccagagatatggcacaacgtagaggaagaagacattccacgctccgatgatagttccagtgtaccacacgatagagcccatgatcagcaagccgatgtcggagtaggcaatgagcttccactgagcggccgtgaaaattgcgctcgatgggttgtaatggctctcaaacttcaccttctcgcttccatccgggccactcttggtaccggcagtcacgttcaggatgagatacatctgccatcccaacaattggtgtccgataagttggacaaatgagacaatgggtgtctcctcggcaaggtgcttcaactgctcaacgctaacatttctcttcgacgccaaatcatcctcggtccaggggacaaagacggtgtccttttccatgtgaccagtgtagcggtggtgacgagcatgtgtgatcttccatgagaagtatggaaccatcaggaaggagtgtgtagcccagccaatgaaatcattgatcccttggtgctttgagaaggcgccgtggccacattcgtgagcaagaatccatagtcctgtgccaacacagccttggaagaacccatacacggcccaggcaacaattcgcataggcagagaagggagaaggtggatatggagggcagcgtaaatcagagctgcacaatagatagaatctcgaaggaggtagaggagggaggttgtgagggacgattcaaaacattccttcgggattgcatctttgagggattgcaagctgggaatatccgtctgctgtaggactggaagattagcacatgtgcactgtttattggaatgatctggcgttataccatacctgttctgcctgtttgacaggctgcctttgtgtcacagccattttgaagcggaaaattgaagatgacagatacaagaaaatatgtagaggactgagagtagttttatttcatctgtcttttattttattttttccctgcccccttcgcccccataaagtatcccctaggctcgaaaaaaatgagctctagattgtcggaactcaaaaaaacattgaccaatcccctttttcgaattcttttccagaacactgtcaaattcggtgcactgacaggggatcagccttctgattgggccatcgtctaacggatggacgcgcttgttccacggattctcattgcactagcctctttctttcttttcaacgtttctggggcccaacggaatttcagtccgctggaacttttgtggccgatacaattaatcaccaaaccgagggcattcattgaatccaatatcggatactaccccatgcgagaacccctacggcaaaatccaaaccattcgggccctaggatatttcggcgtttgccctccaaggctatccaccgcgcgggaagtctcgtacacccctttttcgacctcggtagaatctagggatccactaataagcaaaggttgggaaaaaataaagagaaaaacttaataaagggcttggcagttctcgcgttgtcctactggctctgtcaggggcaggagaaacagcactgccttcgatcgcaaaaagcgtaagcactctttgatcatcctaatgacttgtctgaaaattgattaaggaagctcgggatttttcaccaaacgatagggcatgatcagcacttcggctattggaggaaatgtattggactctattttaagcttatttttgtataacgttagacaaacccgtacctaactaggcatcgcttgtaatgtacacggactctctgattgatgacagatgcgacgtgcaatttgctcaatgatcatgattaacaatgagccctcatttttgcgaacatttgcccaatcgtgacgctaccaagaatacgtgtcatttcactcgggggtcgctctggtccgatactttcagctgtagagcattttaattgtccatatcgtgtatgagccctgagcctaggcaagcctccagagttctttatcgcctttttcaatactccataccccgtacttaccttatttaaagttaagttttgaaggcctcggtagggaggagatcggagtaagaacacacgtgatagaattagcacaccgccctcgtgtcttcggacaactcccggttgaatataatgatagcgtcccacaacaaacgaattccatgtgcatgacccatgggattgcaaaactacctggactatctaccttcctctttacgcctatctgtcgcctgtgtacggagtacaactgtcttcacagccaacatgtcaaggaataattatcagactgatatcacatacatgcacgtgacctagttataagggaaaaaaaatcaacgcttgcttttctcttttttcccctgcaaatatattggccagattttgctctcttatccaatttacctgtggcgacatctacaaactggggttggataatggaagctccgtcgaacacctcgctatcctcaccccaacaagtatccttcaacgtcatatcgagcggtttattccgtatattcaaatctagatttccgtcaaatgcctttccggcatcgcttcccagctaggaatggagcgacaaggagatgcgtgatatgatctggacgcgtgatgttgaatttttgttggcaaaggcgggatctgggtgattttggtggggttgcacggaccatccacattcgagcccgacaatactccacacaaaagacgatttcaccgtacccgaagaggactatgtgttggtcgtgggcgacaatgaaaatcatctccctgatgccaaatgggtgggctatgcatacctccttgatgccataacatcttcgataccgctacgagagcctggatatccttcgctgtcatcatggttcgaaacgattgaactgcgctcgggtgtctccaaaactttgggggtaatgaattgcgcaagaagcatcgaaggtgtcgattaaagaggggttaaaagcttcatcaccgagagagagagaacagcaggagtgcaaagatgttgcaaaagcttccctttacactgagtgtcacgaaatattggaaagaaccaagtgaacttgaatcgagtgtgccaaatgaattttgaaacatctctcatatcatgaagtctcaaattccgtgatccaacttcccctattcgcaatgcgaccccgccattgtttccaatctcgctcggtgaggatttcgtccggcaaccttgaatgtcctccgtatacaccaaaagatacacaatttactagcagggcggatgttgattggatcaaaaatataacaatctcaatttcaaatggcgtcaatgccggcctaaatgcatcttgcaggtagttcccaatgaacaatcaccctgcaacatacagccgtgattccgacacggtggagtattttgacatcatcgcttacttttgtatactacagccacgatttaaaagatgctcgaaccctatcgataagatctctcagacggtaatttgatttttgaaaatattctacacttttaaagacgctctacaagacgacttattgtcatggcgccccggtatcaaagcgttgctgtaatcggcgccggtccatctggtatctctgccgtcaaagctttgcaagaagagaatgttttccagaccatacgtctatttgagcgacggggccacattggaggaatctggcaatacgatgacattcccgatctgtttccatcccaagagtctcctagtcaacaagatcatgaaatcccaggtcgtctcccgctgctcacgtctccttctcccgaagatgtaacgtctcgcacaggcatttacgagggccttgacagcaacgtcggcgcaaaagtcatggcgttcacgcacaccccttttcctgagataaattcggcgtcgtcaactagacacttagggcggtccaatccaacccgaccatttggggtggtgagaaaatacctagaagatttgttccaagactaccttcatcttgcttcgctcaatacaacagttgaaagggttgaaaagcgagaccagaaatggactttgacacttcggcaatccggccacggggatggtaacacccccaaggactattggtgggaagagcaatttgatgctgtgattgttgcatcggggcattatagtgtgccctttgttccgttcgttccagggctaagtgccgctttcgcgcgccatccgaccgtatttgagcactcgaagtcgttccgaaaggcagacgattatgtggacaagcgtgttgtggtcgtcgggggcagcgtctcctcggcggatcttgtcgcggatttacatgccattgtgaaaggccctctcgagctgtcccagagagggaagaacgaggcgctgcaatccgcatgggatctacctaacgtcaatgccagaccaacgatcaaagagatccaagcaacgacaaaggggataagcgtcgtgttctccgacaacacccttttggagggcgtggacaagatcattttcgccactgggtacaagttgtcctatccattccttgttccaaatccagtcaccccaaacaaccgggcagcagggttttaccagcacattttcaagatcggggatccatcgttagctctcgtcggccaggtccgcgctgcgatcagcttccgggtttatgagtaccaggccgttgccgttgcccgatattttgctggtagaaatgcagcatccttgccaacgccacaagagcaggatctttgggaggtccaaagactccaacaaaaaggccatacagccctgttccacgaaatcaagcctgacttcaaggactatttcgatttcttgaccgatttggctggccccccagcaccgggaacggggggttacacactccctccttgggatgatcgatgggcagaacaaggattcgagattctccagcgaaaggataagtattggaagtcactacgaagagcagcagatggattaggggtgactgctaaactgtgaagtcagcattatttaccccgtacattccatggggaggaaaatgtaaatatgtcggtcagcaacaagagcgaacgcagtcgatctgtcactctggattatgtgccattttgaagccaagttagcataattgtggtcgcaataagacagcgagggtttaccatttctatttgcgtgctcagccattctctagttctcaaatgctgttttgcagctttcaaaacaccgcggacgggggtgggactgtccattgcagcatgtcgctcatcttttcccttatgagcaatgaatgcagaaacaggagtttccctttgtagtcaagatgtgaagaacaataagttcgatgctactctgactggccccatccgacggtcttcttgtcgcgcgggccggccaatttcccccataagacttagcgccaaccatggcccaatcacatctcgagaattttacatgggctgtcggtcacgaaaatggttggtcttcgcttaactcgttctatagcagatgattacagcgtgcaatcaaaccatccgcgcaaaacaaagtatataatcatgttactcccaaggctactccgtactccgagataaacatcctagcatctccaagtaatccgccatcatgctcggatttttcccttacggtatactcgccattgcttctgttgcagcagcacgcgatcccactgtctaccttattcgacacggagagaaacccagtgacggaggaaatggattgaatgcacaagggcttgaacgtgcacaatgcctccgcgaagtgttcggcaagaattctgggtataatatcacccatattatggcggaaacgcctaagagcagtatgttttatgtcctctctccatgcagcttcggcacaagggctaacatgaacggcacagatggcaaacgtgcccgtcccctcgacaccgttgagccgctagctgaagacctcggtctcaccgtcgacacatcttgcgaccgtgatgatccgggctgtgtcaaggatgtggttgctggatacgatggcaaaggcttggtcaacatactgatttgctgggagcacgatgcacttacggatattgcggagaaattgggagtcaaggatgcaccatcttatcccgacgataggtcagtcttcaactcatatcatagttcacgctcgacttctctaacataaatatagtttcgacatcatttggaccctcccaggtccttacgacgaaataaccgcggagaccagcgaaaattgccccggtttagatgattgagtaaataatgataaagtctaagtagggttagatgctactaatagctcattctcaatctggcttctgtaggaaggccttaacgggttcttttcattattcctatgcattgattcagttaattcatgcattgttttgtaacgtttacagatggttgagtttttttaagtcgagtgcatgaaattccgcatgtacttgctgcacacttctacttcgaaaattactagtttactacttacggatgatcatttcttatgtgtcatactatgaggaaggacctgagcaaattcgagttttgctatgccacgactctccagtttgcttctactgctatcgtgaccatcttcaaaccattattcattattcatgaatgcgtacaagttattaccatcgccggacaatctgacgacctagcgagcaaggcgtctgatgcgaggaacgcgtcctgtttacatagtgaaaggaccagaaacaagagaggatatatcgcatgtccaagttgaatttgaatttgcaatggtttgagcatagagtagtaaagattgcggttgattcatcttggtattaacaaattatggtttgaacataaacaaaagcatgaggggttgggatcccgttagcatttcgcagttaagacatgttcaggagactgtgggggatggtcaaactcttcggaaatattaagagcaattcatcatattggcaaagcatgtctccacgtggacaaagtaatgattctggttccaattaagaaacacgcggagttaatgtaccaagttatggaggtacctattcgacgtgcgaaatggtgctttccttttcattgggcttgggagcttggacggttccttcctctgcgcggaggtctgccactttgtcggactgaatatctcccttctccagcctgcgaacatgcttatactgcacacttgtcttccagggcgtaagaccgggggtggcaaacatgctttcgacctcctccagggttttaccggctgtttcagggaaggcgaagaagacatggacagtcattgcgaagcaaaagactccaaacaatacatagaccttccatttgatgttttcaaaagcgggagggacgaagtaggaaagggcaaagttaaagatccagttagacgacgttgaaagagcgacagccttgccacgcaggcgaaggggatagagctcagggggatagatccagctgacaggaccccaagttggcgcaaagctggcgacgaaaagataggtgcaagcaatgactgccttggcggcctgaggggacccggagagatcccacgactgttcgggagtattgttgagaccacccggtggggctggtttgccatacgatgccatgatgccagcgttggcaaacatgaacaccatcatgagggtagaaccgaccaaaagcggagtgcgacggccccaacgatcaatgaacaccaaagctagcacagtcatcaccacgttgatgatgtactgaatcgaggatgcgataaggttcgagtttccagtgaggccggccataccgaatacataggtaatataaagcatcatgacgttcataccagtgagctgagaccaaatttgcgtgaacataccgaggtgggttcggtaaatcatattacccttgaaaaggtcaaggtatgaggcatccttgttattgcgctcaaattcgaccatttcacggatctcgtgtaattcggcttgcacgaaaggcgcgtttcggtcacctttggcatggaccgacgccagaacctcaagagattcttcccaacgatccttcttggccaaccaacgtggactttctggcaataggaagacgcagccgaagagcagggcagcgggaaccatctgcaacccccacggagtgcgccatgcagcggtgcccttcaaaaagctacagccgtacgagacgtagaacatgatcaatataccccaagtgatcgcccactgttgtgctcccaccacctgtccacgcttactgggctgggctaactcggcgacatagactggcacttgggcgctgagtataccgacggaaactccgttgataaagcggccaacgacaagctggggtattccaaaagatgaacacacgatggcgctaccaatgcaccagatcactgagccagactggatggccccgcgacgacccagatagtcggttacgaaaccagaagctagggagcccacccaggagccaccaggcatggcagctgagataccaccctgagtggaagaggtagggcctccgcattcattgctatcattggtgccagtttggttgaagaaacacttgtactgctgggtgccgagactgccagagatagtcagtgatcatcagcctcaatctgatatttccaaggaatgggacgccttacatggcggacatagacgcgatatcaaaaccgaatagtgcgccgccgatgacggccaccgcggtgatgacatagatattagttatcttgtaacccataactaatgaagttccacaagagagtctgattaaagatggaggaagaaagtggaagaagggatagagggcaagggcgagagattttaaagatacgatccttaaatgaaatacaataaaaccccgaatgggaaaggagcaaactcaaaaatcctaaaaagaaccctgaaaacgcggagatgcggagatgccgggaaaagtgggttccccggcatactacctgcattatacgaagtagattcccactgctgtacagatgaatatgcaaattaatgccagtgagtagagtcagtagtgtagcggggaaatactatagaaggaaacccgccttttcaacttcgatatgacctgccaaagccaaccttggaagcttccgagtcaccaagtcacggattatcggctggatatcaaattagtttgtggtcagatgctagtgagccccatattatatgtaacattatatgtcacctcaagccacatggtatcatcgcgtcgtcggacatttgcctattttgttcaagggtcgtggtagaaggtccgtggatgagacttgctgtctcctgatttggcctcctttgtctcaagacataaaattcaaaactaactttccgttacagaagactgagcactaatcatcatctcgatgagagccgacacgcgccctgtgctgatgtcgatcttggcttatgaaaggcgggtgatcagacctccttgacaacacaacacgcctctcccgccatgatttggtaacacggcacatgcatgcaacgccctcagagcctgtttgtccgaccaagacactcgtggctatagtacgacccgactagcatgcaggatttacacgatactggaagcaaattccaacgctgattgactggtatatcacactgaaccattcttcccaggagctctgctacgttgaacctccatctcatattctatgctcatagctagtatcgccacattgcggttgtggctggatgattgagtgcgccccctacaaagctgtaattaagacgctaagcccacctttagggctacggttaccagattcaaacacgcggtctcggatcaagatcccgaaacaaaggggctgttttcttacgccaactgctgaccactaagaacgggtcgtttagcactcgactccttcatccctgcgccggccatcaatgacgtgggaagaatccctttggggagctaaaatcgggcggaaacaatgcatcacttcctcccgcctctcccttttgctcgacacatgtctaagaatatggtgcgaatacgttccttaccgaattgaaatcaatgacccgccgtctgctgccgtctgctgccgcctgctgatcccagctcacttattagccagcaagaatatgtgatacacctccacctacctttattacaaggctaagaatccatgcagagtccaggatcaacaatccaaatgggaaactgcgtttaactaactggttgcatcaccccctcaaatttgctagcttcagacttagcctctggtatgatcaatccttcctggctgtctagactgtctatagaaggtttgcaaggtcgtgtctgacgatcagactaccagcgttacatttatatcatgtgtggcttactgttccttgtttttcgtccaaaaaaacagcctggtccatcacgtgacccatctgtatcaaggatggaaaaatgacggttttcatcccagattctgacagtgtttctaagcttgctttgatgttgccacaaccgtgtctgataggatctttatcggtaatcttaaaaatgcaataagcccgaggtgctgccacctcaatttagcgcgacaaatggtctttcattaacataacctcgatctattcgggctatccagtggtattcgcaagttaaattgggaccgtatacggtcagccacgcgaaacgaaagccagctgcaggtcataagtcaaatctggatcgtatgagggtcattacaggatagaagccggctgtaagccgtagtacgttagattcggacggactttgcgtcgtttatgggtagttggtacgatctattagatttgattggactactttgtagtgctgcgatgaaagagggaaagattcttattttccaaggggcagaatgcccgactatctggtacggaaggttggcacgggcgacaagtacccgcagtgggcacatggtgatgtttcctttggtccatggtttcgaaagccttgggccaaagtgtggcattccgccctttgaacgaggtccgccattcgacttcctttgcaatctagttgtataacccccatgcactgtcctttacccattcagtttcgtactggggtttttggaggcctccaagtaagacaatgaaaaccccctcaaacaacttgagatatcctctctcgattggagattttaatgatgcaagaagacgaaattgagcctttacaccttgccataagagacgatatagcggagagttggggtgtgtttcccatagtgagggacttttgtgacggataatccgcactctgattgccacacttgatccaacatatattgaaactgtatttccatgttgatatgtttcagtaataactgagagatagatcccatgttcgtcaattgattgggagggggctgggagcgcgagaaggctttccagtgtgatcatttcatctttaaacacctttaaaaccgacttcggtattgctgtagacactatatcgactagccagtcgataaaaactcggagaaggagacaccagaatcccatagtcataggtcgattccccattttccccaggtttactgattggctccatccttggagcctggtaaggacctggtgaattgtattgagaagtcgtcctcgtggctttagtaaatttgaggtatctggcggaagtaatgtccatgtgtcactgtacaacgtcaggctgcgggactgattcgcaatttgggtcatgggagtctctatgctgaagattgaggggaactccagccattaaattgatggaaacatgatggacttgatgggtgtacataccgagtaagcaggatgagaggttgaagaagagaaagagagaaaggaagcaatttctgtgtatatatatacactcccctctatcaatcccctctatcctaactttgtcttataagttaagagtgagacatgcagttataagtgataggatgcctagattcacaggctcttaataacttactacatttacgaaagactatggttacctgatttctcagtagccacaccatggtgttctcctctctagcactctactactcctagtgactctgctctcacacctgtttcgcaggcagggctgtcggtgcccctgtccctcgtggcagggtccctcttcaatattgagattagaaagtttgtcctccccagatccaagcctcattcgactcatattccttatctgccatatataaattcaactagctcaatgttattctgatggtgagtgaatggtcacatgtcctaggtaatccgccattagacccgtctcgggtggagccttgtagtaccctctgtctccaataaacaaccaaacacagccatctaaacagcagtcaaagataacggtttgcatccaataattgaatgttgaaaaagttaacaatggcatagactctctagggctatatgtataaatgactcgagcaccactcgtgtagcccttgcaggcaatctccacggaggggatggccatcgatcatatacccaaggaggaagagatcgagtctgacaaggttgccttcataaaggggatacccagagatgaaaacattgagtccaacatttgcggacgtggacgtacttcccggtccggaagacaatgaccactttgagggaattcacaccgggggcgatgattcatcaccccagaaatgagaagcaaattgcgagatgtttgtgcactaggagattgtacactatggtgtggtctatgtgatccccatgcttgctagctgaccgtcctgtatggttggtgtcgctgtgttgttctcgtcttgcctgcgtggccaggctgcccatcgtgcatttccctcttcaatatctgaatttctgacgcctgtggcgttggggatcaaaatgcggggtattaccctcccggcgtaccgcctacgtgaccatagctatccgtacatatacatagacatcccggttacagttacgagaatcctcatttcctcaatttcctttattccctccgcgaatctcaaatagagcatcttctctttcagaccatgatccactactcgatgctttgctaccaccttacacattagaatcactggtacatccgcaattaaaaattcccgcccgcgatgaacggatatcttcaatgaaaactgacaaccacattctaccttgggccgaccgcggaggaaaagctgtacgcggtgtcacctccccgcgactgttttcaataacaaacccacgatctgttacacgatgtccaactcataagcacccgctaatggcaatggcccagggtgataacccctgagccatcattcccggtgagtcgctggagcatattcacctagctacacattcaagatatctctgggtccgaatggaaccaatactggataaataagagtgccataagacataatacagcattagaagccggatgtctagggttgaaagatcattgacgaaactggcggcatccgcgggggctaacgtcgaaatgcccgaaagatggcagcgatctgttgatcaacgagggacaccagacattgcattgcgtgtcgctaacatggtttagtctgagagacagagactctgaggttttaacaattttgtttctgcttgccttgctcttgtaggtgcgtccaatgtctcaggtcgatcctccgttctctcggtcaccatcaccgagcccactcgggctgattcaccttcatcatcgtcaatttttatattcccatgcctctcaatatacatttaatatcttcccaatagctactactcgtggcctttattccctctggggcgatgtagataagaaccgtctataccttaaaacatagcgccatgactctatgactaggacaccatcttcagtacagagtatcgtcgcctgcaccaccgtgcacctaggtggctcttgggctgtcaatttctggcgctcgaaccaaacacttcccgccaatccatgggaaattgtagagaacgtaatttccttgggatctgtgatatcgattaatgaatacagtcggaattagaatccgaaaaagcggcaaactttcagacaaacggaattaactcggtttcaagatgtggaaacgataaaactttgtagatccaccgacttcggtatggtgccctagcattggccggataggatcaaagtttgatcttccagaagtccgtaggtggccaaatctgcgataaaaattgatcttgaatacaatacttgagcgttgctttagtccgtaattaatttcgtggttatattcttcgctgtttacccgcggtattcagtttggcttaagttgttgaagttatccgaatgtgctatcatggacttgatacttcctaatgacgtacttctcttgataggagagcagctggaacagagagcagaccgacggaacctcgtctttgtctcccatcactttcacaatcttttcctcccactggtatatcgaaaggcgtccatctaccattggcaaaatgccaattccttcctgcatgcattactgcaacgacctgcgctggcgcgggccgttcgggagctagacataacagactggcatgcaagaagcgtatcggaagatgaatgcaatgaaattcggacttcagcatctttggtggcatggctaggtgctgtgtcatgctcaacgctcgaaagtgatcaatgggcccaaagtctcgggcaaggcctcgctgacgcctggattgcgctcattctcccattgttaagtcagctaaggaagctttcgctggcctatacgtcaaagtctccttatttggatcagatcatgcaaagggctgtggactgcaaacagccattttccgaccagccagccttccggcacctacgcgaggtctcattgcaccaccgggaagatcttgatcacagcgagcacctggaaagtgggactcaactatcatcaactctgctcctgtcatttttccaactgccgtctgttcgtgctatcgcagccaactctgtagtggaccctagctccacaagggaaccgacagattatgagaagccacgccttgccttctcctcaatcactgatattgatttccgagcaagtagtgggaactatggcatggagatattggttagttcatgcgcagaactgaagtcatttaaataccagcactcggactcgcacatcctttcgcatggttaccagccatccgccttccatcggtctttgattcacagcaaaaaaagcttgcaaatactctggctggaccactatggaagccactacccgttcaccgctgctggattgaaccaatcccacgatgagtgctttggctccctcgtcgaattcaccgccttgaaagaagtgcgcgtgagactgccaaatcttctggatattcgataccagaacgaaccaaccgtgcctctcatggagtgtctaccaccgtcacttgagactctgtatattgaaggatgcgaggagcgatatctgggaatgttggtttcccagttacagagcgtggtcaaaatccgacagactcatttccctcgactcaagcgtgtcgatatcgagggtgcattccaaaacatcccgtcggatgacgatggtcaggttgccagctccgaatcagaattacctgctgtgattaaggacaaaatatatcaggctgctgaacctttgcatatagactgcgtcaatgctggtttggagttgcatcttcacgaccgtgcactgtcacatatttgattatctctctctattcattagcgaactccaggcttgcatattccaacatttgatttgacgatagataccatctgaaacctctttttatatagacctgcctcttattattcacgactatttcaatacagactgagaatttgaacttttagatcattggacagacctccgacagacctcccactcttcattcccaattcaagtgcttgataggtatcatgccgaaaatgtgaattattcttaacgaatacactgacccaggccgcagagcgtgttcgaaattttatattgtgtatttttgtaggccaacacttcataaagaaacacgcttctaatatatcatttgcgattggattggaagtgatcggagggtattctatggtccgtgtacttaaagggaagcaagaaccgcatcggcaccagacttctgtagagctgttagcatcatacatcgctaaaacgaaggttaaaattccataccttcacaacacccctttcggtctcgatctgggcatagccgatcttaccgtgatcgataacgatcgcatagcggcccgtacggcccgaggtctcatcggcccagccaatgctcttagaaaacttggcatcgggatcggtgaggaagagctattttacaaaatcaatacaagtcgcagaaatgtgtggggcggggttgtgctgctcactatgtcatctccgcggactccgttcgccttgccccaggcactcataacgaacggatcattgaaagcaacgaccgcgacaatgtcaacccccttctcacggagcttgggcaggttgtggatatagcctggcacgtggttgatagagcatgttggggtgaaggcaccttggttcacactcacgttaacaaagtccgacttcagctacagggtgagataaacatcaacttaccgggaactgagaacaggacaactttcttgttggcccactccttcgaggcattgtagtcgatagggatgccgcaggaggtaatttcaccactttcctcgctccatggaatgtacctggaggaatcagcatcattctttgcgggggtcaggatttacccacttgaagacaacgtcgctggggaatgagtcgccgggcttgagtgtagtcatattggaattattgtgaatattagagatgagagatatgtaagaaaaagttgaggttttggaaatggcggggtgaagatgtctcgacgtcacctgtgcaagctgattaatatgtatgaggtgatcgcccggcggagctcgccgacctcggcatccaccctcccttgtctgggctggtttagacatgaatgaacttggagttttagtgataaacattatgactcaaatgactgtacgattgatgatgagctatatagagaaaggtgacaggtcaagctcccaaatttcccaaataggcaccggatgagcccgcgtggggcttagtttagatatcgagaagcgttgaaattttgggtttgagaggaacgatgcaaagatgacgccgtgaaggggcgagcgatcctcagttttctttatacattaagtttcagacgagagccgctttcttcttctgataagtctatgtaaggggaaagtgttgtacaaatttccggaaatgaatccttaacacatgcatgccatgacagccaactattttttggtgttcttcacggggtgtaagaacatcggaggcaggcagagatcactatgatcatgctttccgtgtagtgtcagcaaatttcaacagaaaaatcaagggaccagcgaaaccactcacgtcgtctgcaccatcgtaacctagccaagctcgataaatctttccggcaaattgcgacccatacatgtatgatatcttcatcatgatatcattgtgctggttccagttccagatactattccgcccagcgctgattttaccaggcttgcctgaattagctcggagattgagctcaacaggacttgtttcgtgcgcatggtaaatgggttgaggaatttgaacggctttcaatccataataaagagcccaggaggtagggcccatttcagatgctagtcccagccctttctcagtcgtatccttatgcataaggcgaagtaatcgcgccgagacacgggacatcgcgacaacagatgcccgccgcggagtgcttcccctctgccggaaattatatatacggttagtaagaagccaatcagtatgctgagggtcgaattgtggcagccaggtgatcaagtcagcttcctcgcccacgccccagctccaagactcatcttccatatctgcgcgcggtggctctggtgcttcagcccaagcctcgatgccttttgctggccgtggtccccagatactatcaacgcctgtcatgctttgatctacctgatcggtaaaattttcccagttcccgtggatagcgggcatatagaagtaggagttgcgctcccatagattcttgcgacgctgttgttttgcaaactctgttgcctgctggagaaggtcgtagaaatgtcccgtataacgtgaatccatctcaaactgccagaaaaagtcgtattgtgggttcaatcgtgagaaaatctgcatgggctgaaagtattgaagcatggctctaaagatgggttaacgtctcgaaggtactatagagaggatataaatcttactcgtgaataccgatcattgggtaccagtcctctagtatctttgagttgaagaatactgccagatcccggagctctagcggaagagactttttaagactgtccaagtccgctggataaggcaattcagtgtctttcgcatcaaccaagaggatcacctcatattctgcgcctgataagagcgacagctccattataatcgaccggatataataaagatcatcattcgtgtattccatgtcgagccatgtgcgcagaaccacccctatccgtggtttgaagatagcagaggtatggtctcggtttgtctctctcttctctctctcatgacgtttcgctgttccttcctcttgctccctgtgcagagtcgatgtcttctcgcgaatatccgaaggttgataccggtctgcattgcgctgcaaacagtccttttgcaaagtggcccaattcacgtcctgccactgtactttgtgtgcttgatctccgtagccgtatgctccatatcgagaatatcggtcgacgcagaaactccaattgagattccacgcctcgtacgatccaaatataggcgctggaaattctagaaagctatcagtgcccaagtcaaatgcgccagaataggtttggctcaattcagacctgactgattccagtgaaatcctttcatcgctgtttccgcgtccctacgatccaggactgaaccatttgggccaacacattgctgataggttcccttccacgtgttgttccattcgccgctgttatattcaggatacgggtcgtaaggtatggacgatgattcgtgcgaagttttcaatacaagctgaccgagaccacccccatcataagcaggccctgagcctagaaaaaaggcattttttcgactgtaaaaagatgagcgtgttagcgaccgggtcaaagttcgctatcatgcgatttggacgtcaggacaggtgaaaggacataccttgaagcatggattgctaaaggttgttcccttgaccgaggtataagcatgaaaattgtaaatgcaatgacgagagcgattgcaacgagactgcgctttaaagaagtccggaataagtgccggcatttttgcacaatggcgtgcattttcaagacaggtggtggtttgtaggaagtggtttagtcaatattcgtcgtcatggtagtagtgattcattaataattagggatattagagatgcgataaccagttagagcgagaaaaggaaaaagaaaaggaaaataaaaacatgcagttcctacttcggaatccagcggaaagattatggcactaaaactgcatcttagacccgggggcaacatggggcaacatggggcaatatgggggttgcagtgggccagagatagattttcaagagcctcgaagctctaagtgaaccatgaccatcccaaaatgagttcaatcttttgagactaaaactgctcatccttttgctaattgtgcgcctcttcttgaattgaacgaagaattgtggaaacaaattactaaatacataaaacgaaataatacacgctagtatatattagtacccactagcacagcctatcctaatgataatatccatggataagatctcaatctctttatagtacggagtacacatatagtagccactccatgcttcgtacctagatgactacgatgtatatgtagaggagagatcataacgcgattatatgaaattgactagaatagctaattcagaggaaagggacgctgtctaggacaaactgggacacgtgactacgtgccctagcatgtacatacatacctagatagtaccaactgtcgcccaactccacctagatttagcgtggtatttaactcggtatcttaacatattcaaaccaagttaatatataagagcagctagcatcattaacagttatataattagtcggttatcatactaactaactaagaattagcagattcagagacttgtatatcagaagggaggaatttgagaaattccatataatgcagcctgcgggttcagtactgaaaagtgagtggatcccacatatcacatacggattttgccatgccacttcttggaaaccaacttaaagcgaggtaagcctcgtcaagccttgtcgtggccgctttgagccctccgcagtatttacaatatccaagaaacagtcgcacgataaaatcggattaaattatagatttctcccttattgtcgccttgaaaattacttgaattacgattggaacattatcgacatcaaatcgaaagatgataatatggaaactccagaatggcaaattgtggcattcattcttttagttttcaacactccagatgcaatgtgagcttatcactgggcacgggcacctatattcctgacttctagggtgcatatccggcttgtcagtcgaacagcccggctccggtcaattcaaaaataccccggtatcctagcaaagcatcacgcggggaagcacggattgtttcatactacattttctaccatattgaaatttatattctccattaggattaaattcatggaattggttggatattgactgtggaacccaaattccacagatgctgacccttgactcccgcaactagaacccagaatgtataaagctgcatctatcctgcatatctagatgtaaaagtactactttgcaatattaactgggattcagtcgactgatctagaggtcttggctacattggatatcatgttcgaagaatccattcaaggcaaaagacttcgccttcttgcccggctgagttgctctttggtgtgtccacccacatattgatcaagcccaatgagaacgacccctaattatattgagccaggcctttcttattgagggttaccaggctggaattctcggaggagtgcaagataccaaaccataccgtgatgcactcggagtaagctgcctccaaccagtattgtatgttctctgctgaccttcggaaagaaccctgaaggggcggagataatcccaatgatcgcatcttcttacacactcgcagctactgtaatgtccattgtggtggttgttgtggggatgcctctaggccgccgaaattcaatcctactcggcacggtgttgatattcttcggtggcatcattcaggcagcatcatactcggtagcacaaattatcgtagcccgggtcatatgtgtaagtctgtgccctttcatcgacgtgtcccgaattcgaaattaacatatggctacctaacagggttttggtatcgcggtaagacaagtgcagcttacgagactattccatttctgatgtctctcgcagtttattacatgcaatgtccctatgtatatggtacgagcgtccctcctcttgttgacaactacaactgatctgatgcaatgatctagtctgagatgagtatccatgccaatgagcgcggccccgaggtagcgatcaactgctcttcgctcctcgcaggtatcgctttatcttactgggcggactttggattcacaagaatgtcaaatcagctatcctgggtaaggttataaattctcgtcgctaaaactgggaactaatagttgaattgtcaaagcggttgcctgtttccatccaatccatctttgctctcttttcagcagccggcattttcttctgtccggactcaccaaggtggtattatgcaaaggggcgaactgctgaaggcgatatcaccctggcaagactatacaatgtctatcgtgttgacaatagtgctcagcccgagagtgcttccatggagcttgtcagagctgagattatgcagaacctccagcttgaggcggaacaagagaaccgactcagctggctaagccttgtttgggacaacaccccgctccgtgttggccgtcggataaggatatcttttatcatcctatccattcaacaaatgatgggaatcaatatcatggtttactatatgccgctaatattttcgaacgtcggcctctcgagctttttatcgtcgctcatttctgctgttgcattgacagtccaatttacaggctcactggtcactattcctacaattgagaggattggccggcgtcgaatcatgctggttgcagctgccgttcagagctgttgtatgcttgttttcgtggttttgaatggtcttcctagtaagacggaaaagacccaatgggcagccgctgctatgatgttcccatatatgttcatgtacggctggggatgggttacctgtccgtggtaagcattcaaagctgtcaaatttgcaatgcataaaggttgacacttattctaggctatatggacccgaggtatgattcttcgctgtgctcggcacgcctaatctgacttgaatatccccagatcgctcccctcaagtatcgccacatcggagccgcagttggcctgttcggcgagtggctattcagttttgtgacagtaattgctggcggcatcgggctcgagacatccggctggaagatatggatttggccccttattttcaacgtgctgggttttgtcttcgtctatttcatgtgccctgatgtgagtgctctaccatcgaagcccaagagagcgatcttgctaactcaatatcaaatagccgaccgggagaactctggaagaaattgacgctctatttgacacggacttcagattaccacacacttccgacgagaagttatcagtgcatcaaattgagaatacgcatcaaattgagaatacgcatcaaattgagaatacgcatcaaattgagaatacggcttaagtcatcaaatgagatgcctttggaaagaaaggcgagcttgtacatgtgacgtcgcttttaatatgctatctaaaactcgatattcgaatatccgttgtaccagaaccaatatcctcgtgcgttgcggagatgtatatgtgggggattgtatcagggacccccccccttggttgttccaacccccctttggctaataggaccttcccagcccgagattttaggtatcagttatttctgccgtttcttgtattttctgccaggttgcaaagtgggaagcggcttgcttatatatggttgacctttacaaacgttgcaagcttcgaaccttcttgctgagcaatcgcaaatacctatataaacaggaataagcaagcaaataactatgttgtatacaaatcgtaggaaaggtggccaggaaagcggccaaaggtacggtgagcctttatagtaggcggtcagtttatgcctgaactatcgggcggattgcattagccaaggggggtccttgatacaattccctacatatatatggacctattattcccctaccttagtagagatcgaggaaatggatgtttagagttttttattcaaggtaccatttgtattggtatactatacaaaaggtaccttattttgcaatttttatcgttcagcgaaaattatcgttgactggggtaccagtgggcgcctaacacgattactgtttcgcaaacaaatggtattggacacggcattaatactagtgcaaaaggagtctctcaactccggtatatataattgatcatattcagcagggttcaaaatatatgttctttttcatagcttgtatttgtgttcatgtggctctagccgtcgtattacttgtgcgatagcactcttacgttcaccgcgactttgccaaaacgccggaatggactttgtagtttcgcataagaggcgaagagcgttgattcctctggaagcatgctcctccggaatcatttgtcctggttgattcagtgatgcattgaacacctcaagcgagattgggcctcggtacccggtgccaagcacagcagctgcgacaagctcaacaggcatatatgcacctctagactgctccataggatatagccgatgacttcgcgaccatggaagcagtgctggtgtatctgggtcagttggaggaaggaaagtcgttgggttcatcaactccgcatcgccacactggaagaaaaatatccgatcacccggtaccgtcgagaccaatgacgcgagtgatccggtaaggacttctagagattcctctaaggttgggtaaatccgcccgtggccagcaacattgtacggatcagcaaactcgacggcgaggatattgaaggcatccacgattagtccaacgttggggcggttggcaaattgcaccacttcccatgaggccgaccatgtgtttcgagtcgcccaagataggccttcgtacccaatttttaacattcgcccaccgtcagcctttgcgtatgcggccgccatgtcgcccagttccgcgagatctcgtgccactgtcttgagatcagatgtcacacccttatccgcgcgaatattcgcacacatgaagacaagatcggtgtcaaaggcgcgcatgaacggaaaacgtctatgtagtaggttagtatagatcgccgctatgtcattatcgaggtaaggtatatctcacttggcgactagatcgaaggtagcctggcgttctgttggatctttgattccttcaattttccgaagaggctgggtgcaagcaatccgcattcccaaggacttgacaagacgagccaacttttgagcaatctgcagattctctgaagtgggttcccaaggctggtctcctggcagtccatgttcctccaggtatgcagcccaacactcatcaaacaagtcgatccattgatatcccgattcagccgcggctttcaagcgtggttccaaacgatgctctctccagttgccgagggacaaggtggcgatacccagtgggttggctttatatggaggccaggatactgtcatacttccaggtatggtagcttgtatgattttttttgggtaatgagtcgcgtcaattaatacaacaaagggatgcgaatatctcgaatatccaacctgagttgatgccacctccacaaaccggtgtattttttaatgcaccgagtggggtagtctatcattcttatgaaggtgtacagtattatgtattaatcaatcaaaggatttagaaggattcagataacaattgattgatattgttaaagttttattgaaagtgccccaagcttaagggactataaggtcaatgtacagacacctaaacgaatctcaagttcccgcacaaccaagttttcaactcaaggctcttcaataaaacgaccgttaatcgcatgatatccttaattctacaagatgttgaaacgaaataccctgggcgactggaagcttgacgcgtatcaatggagttttccacccagcctcttggtgatacctgcgtcgtctccgagccgtaggtccaaagagtgttgtcggggacaactatagtccctttcgtgcccaaaatgctataaatatccacttggatctctgcctttggatacaaaggattgtcgccagtagcagactcccaaccgtatgggctcgccacattgtcactcaccagaaatgtgccaacaactccgttggaaaattgggccataatcgctgctccctcttcaacgatatcatcggccgccacactttcgtgtttccttctgggtatggtgtttatggcccatacacatgtcatcctggcacctgtgaggaaatgaagggcatcgatatcatgcacaaaattcgtccaaatcggccctcctccggcggaccgcgttgcccgccaactagcagaagtaaaatagccttcatctttctttgcagtccacaatcccgagatagctgtaatcttcccaatttttcctgtttcgatcaccgaccgtgtagttaacagcgagggatggaatctgcggtggtgtcccacaaggattttgcaacctttttcatttgcaagcgcaagtaactcggttccagatttcgaatctgtacaaaagggtttttcgatgagtaaggccttgggacgtgctcgatagatgacatctatcgctatggaaacatggagactcgaagggacgcatatcacgtaggcctttggtggcttttgtagcgccttcaaaagtgatgcaacagactcgaagtgcggaagagacaagctcgacgccaattcgcgtcccgggtggtacggatcaacaattgccaccagttcacatgttggtgaagacataagatgcttgacgtgcaaaggagctatggtacctcccccgataagagcgatgcgaaccttcgggctttctgccatactgaagacacaagacaactgtttttggattcacgtagaaggcctatgaacctaaacaatgtggggattaaacattcattagatagaagatatatttcacagtttgatcccggtcaatatatcaaaatgccgacaaatatgaatgcggggtcatcgaaattcccgtaagttgtcttcctagattcgttggtattattttcaatgatttctctcgttagtccctccaaccctacttctggtccatacaaacaccaaatatggatatcctcaagcaatcttatgctcacggcagctccccgttaccatcgaacgcagcagtgactcagtatcacatctatctttttggtagtaatatctccaaatcactatcgcccttgatacactctatcctatttcgcgccaactcagcctcatgggaatttcacctcagccagaccactgacgggaacatattctggaagcaattacgtgacaacacatgcattgggaccacaatcacgatgccgaacaaggtgtcctttggcctcctactcgacgacttgaccgacgaggcacgcgttattggggccgtcaacacctcattcgttcggcttgatgatcgtggacagagaagatatatcggcacaaacacagactgcatcggtattcgcgattctattctctaccgaatgccccaagcggctgccatggccaaaggccgcccgtcgatggtgattggtggtggaggcgctgcgaggagcgcaatttttgccctctggaaatggtttgggtccacaaagatctatgttgccaaccgtctcaaagccgaagtagatgctttgatcaccttctttcaatcgacggcaccggatatgacactccaacatctcgctactgttgaggaagctgcaacctgcgaggctccttatattgtcatcgggacaattccaaacgatacaccaaaagaacctggtgaaattatttgccgtcaaatcttcgacaccattttgcgcaggaagaacaaaggcatcgtagtagatatgtgctatctcccattgccagtgacttatttgtatacaaatggacagcaaaatggctgggcagtcatcccagggaccgaggttctagtgcgtgtttgcatagcacaacatattctctggttggagaaggatgtcaataaacaaggagtggaagatgcgatttcagctatctggaaagttgtaaatcaggggcaaagtggtccaaaggcttcgaagatttgaattggatttttagcgttgagactttcattgaatactcacctactcattcttcattctattattttctcctcccttggcgtaaaacaagtatgcatctcatgaagtgtgcgcaagtggagatggctgcgggtgtcatcgattccttcgagatagtatagccctttaactaactaggaaggagttgatgcctagatgccttatcttataatggcagaaaaattctattggcactcccacatagctcaccgccactataaacatataccgcctacctaaaacgcgcagtatactagtatagatttcatagtatgaattcatggagtttttgaccggcaatatgttagaattaatcatggggtggctaagggtgcaaaaccttatgtccagtcgctgtacggagtacatatgccttaataatcgaagtactcccgaggtctggttcggagagagagcttgccagccacctccaaaaattgagatgcatgaatttgtatggtgccgaaagcttcatttattacatggatcatttatatttgtatagagcagtgtaaagagcggtgctaatgaaggcattcagggaccaaaatgcttcttaaaaaggggtttgaacgctggggtatcaaaggaacaaaacaaaatatacatgtcacttgaagattttgactcgtagtagcaatatttacctctggtttcgggcctaattccgatcattagtgcgactgtttccccgcagttgtgattgaccgggtgacaaataaatagcccggttaactaggtgaggatatcactagatgctacaagatatagagcggaataaaggcgcattatgtcccagcgagagaacttaaatttctcttaaacattttttaactttgttgctgggtctgtatcaccatgtctgcatcgcacatctcccctctcgctcaggtatgcttctctggttaaaccaaaccctcgatgagactttctaacaacaaacaactagcccattacgttgaaactctctgggaaagtaatccgcaatcgtttatatcgcacacctctcagcgaatatgcttcaacgtatgacgaaaacaacgtggagaactgcggcaagcccatggaccgatatgcagagctatatcaaagtatgatcgggactatcataccaataggactagtgctaacgagtacacagagctagccgatggaggcgcggggcttatttgcactggaaacatccccattcatcgcgacaatctcgaaaattacaacaatgcggtgttggatcccaacaatccctgggatccggtcgcagcttttactcccgcggccaaagcagccaaatctcggggtgcaatattcctccctcagttacaatttccaggacgtcaggttccggaattcctgaacaaaaatcccaagtcatcatctgatcagcagcttgaaccttgtctcaacaaaacgtatggcaagccctcgccgttgacgaaggctgaaatcaaggatctcatttcgcgatacgtgtgggcttctgaggtccttgcagaggctggtgcagatggtatcattgtgagtgtttgaatctattcctgacttgttatgaaaagctaaatgaggcgtattggtagctgcatgccagccacggatatatcatgaatcagttcctgtcgcccaaaatcaacaagcgaacagacgaggtatgaatgttaaattcctctcccccttgcaatcaattaatgctaatattgactaaactttacagtatggcggaagccttgaaaatcgggcacgctttattttggagatcgtcaatgcgatcaaggctaaacttccatcggacaagtttgtgatagcagcgaagttgaactgccaagattgttagtatttccatcccatattttgaagaaaagcctaatgggaagatatatgtagtcatcgagggaggccaaagctttgctgaacaatgcgttgtgataaaatggctagaagatgccggtgtggacttttttgatatctcggggggaacatatgcctctcctgcatggcgtggcaacatcatgactgaacttgcagagcgtccatcccaaaaacagcgtggaaggtaaatgatttcaattgcttcactgtttttatatgctgactatgcgaagttacttcattgagtgggcgcaggagttgaagaaagtgctggtgagtatattacatgttttctgcgacttgtgatcaaataagctgattgacaaatcactagtctcgggctgtgattggaactaccggtggctggcgtgatagccatcgtatggcggaggctgtggaacgtggagacatcgacatgtgtggtctgggtcgacctctccgagaagatcccgcctttgtgaataaggtgcttcaaggggaaattcgcagaagtaacttgtaggttgatactcagtgatctgaaacagtcactgtaacccacataatatattcaatgggatgttaggaatcccgcaaagaatcatattttcttctctttttttcacttataagatcactaagaatgtacctttgacccttcatgcagacttttcccatttagttcatagaagccattgtaaaatcaatgctaacctgactgagaaatacatggtttatgaaagcagtagattattgccagtcattggacactaaaaatgcataaacaatagctatgcttttcagatttctatttgccaaaattgttaaaagacggccccaaatccaggcccgaacatttcccggaagaagtcagcaaacccctcatcatttagatccccctgggtagaaattgacgctgtagtcaggaaaggatcgtaatccgagacgaaagcctcgtatggcttcgaatggggggacttctgtggcataaattgactcgcttcgttatcaaagtctgtactggtgtacgacgcatccgttctggtctggcgaagttgactttgggctttcagtcccgccgctctggctctcagtatcatcatgaggtgttgtccaagtaacgctgcgattccaaatcgatgcggtggagttgttcctgcacgttctaattgaatggcaagttggctgagtaaagcaagaagttccacgtcatttccggcgcgggatccatacacggtgggaaatagcttcaaagccaacacgccggcgtatgatatcatagcccaagttggggccaacatgcaatataatggctccccaatatgatgcaaatcgcgcacggcgacctcgcaagaattgactgcagcctcaaagcaatccagtcggattgcatccatattttggtcccagtttatggaaccgtgaagggcaaacgacaaggtccaaagcctcccgtggagataaacataatggaggaagatatgggataacttttcagacggcgatgtgattatatcgggcattggatgtgacagccaaaggtcacaccacggcctcagagttgtatcaaccatttctcgtacccaatggggatcaacgtgtgtcaaatgagcttgattttttagttcattttgtagtgatgctagaatgcgtcgcaaggtgataaatgcacatgtgtgcttgtctgtagggtccgccagatgatgaagccaccagctatcaacactttgtgtcaagtccgtttccgggaatgtgtgaattctaccgcaggctgcactgttcgcccgttcccatagtagaatccttagccaagttctctcgcgatttcgtgccatgcgttgattatcggtgtgatcctttggggggtactccagtaataaccgggacgagtcctctcttgggagtggtgctggggctgcatcttgggttcggtaataggaagcactgagcgtgttcagaggtgtcgcatctttggcactagaatcctgatctaggcctagttcggctgctacaccaaaggcatacattgtgtagagccatgagcgttcctgtgacagtgtctctgcgggagtggccgataacaatgagatatagtagccttgaacgatttcaaccgacttatatccacaagtatgaacgtgtttcgagagtttttcgccatgaaggcgtaatcgctttgcgactgatgctgactcatgatcgaattgggcagttaaagccagtatccaggtgaacaaaagagccgatcgtgaacgcacgaaatctggtgtatgaagcatcggatctaggattccgttgactggatgcaagcggctgaaatatctagaattaatcagtggatttatattgacagtgcagttaatatttggacttacattggaaatagataatagacctcagccatggtcaccaaaccaaggtccactgggtcaacatcggggccaacatcgcgtagaggcacttgaggagatgacttgaaatagttcgagtaacggtatgggtgctcagaaggaccgagcagagcatctattcctgcttcaagggtgtctctgtccagttgtaggccaagtgacacgtagcctggccgatgaagcagttgccgacccaggcttgctccaatggactggctagccgatgactgtgaagtagaaggtgtttcgtttgtttcacaggaagtgttggcagacattgactgtagctccaaagcttgggcggcgtcggaggcatctgccagcaaggccaaaggattactgattggttcccggttggcttgagagagttcgccgctgcggaatacaggagagacaagttccgctagccgctgattctcttgtatagctggcagagtcgagttaaaacatgacgcacaagagagttcacttcctagctctggtgatgttttggtggggttggttgtctcggctgagtggttagagaataagagctctagaatcggctcttcgcttgcgacgaaatcatccatctcatgattctcgcccgtataacaggtttttgccttctttaattccgactgcattttccgataggctttttcaaaaccttgatagcgacctgtcgcaccgcgcttcctcccaagttttctcggctctgggatattgcactcgcggttggtacgcttacatcgttggcaaggttctgtcaagttgtcgccctgttgctccctttgtgggcggatgcatctcatctgaaaaatattttgtgagtaagtatgtatatgacttggggtcaaggattgtagggtataccttcattttccgacatgcctcacacgcggccgcgctggcgcgagtttggccagaggtattatcatccccagaatatgatgacattgaggctctaagcatcaaataaataataggatcgaggtagtcaatggaaaatgtttgtttgatttagggagaagagagagtgtggagaaataacaaagaaccccggaatttcaaaaactgcggggaaattttcggctatgagataagttataactctacacgcctcgacctccgtccacctccaatgtcgttccagttacaaaactgctctgctccgatcccaggtaccatgctgcattggctatatccactggctggcataatcgcttcattggcaacgagtcttctacttggcgtagccgctggcgggaatctgcgccatttcgaatgctagattgaagccttgttcatgttaatattgacctgggggttgatttgggtcaacatacatcgacgtgtttcccacagcaggggaaatacagttgaatcgaacagctggagcatactcaagagccattgtcttggttgctacctaaaaacgcgtcactatctggcgcatccaagagcttcccgtttttcacttacttctacggctgctttggaagcgttgtaaatggcaaatcctggccgagggcgtgtacaacccgtgctgcaccagtcaataacttcataccagaatcggattggctgacccacctcgttatgttgataaatattccatgtccctgctgcatcataacaggcgcaaagacctgtgcacttataaaaaccggctgtataggtattgtcaagctgttatccacccacagcagctagggcatcctactttcacgttgacattgaaagtcttctcatattcgaggagactcttcgtgtggatgggctaaaccatcgcattagaagggtgatcgcattcatggagggaaacatacagatgggtcatgggtaattcctagttgggctgagtcaacaaatcagatcgtaatgttggctctttggaatgttctcaccagcattgttgaccaccacatcaactctaccatgggttgtctgtgccaaagctagggcgttctgccatgtctctgggcgagtcacatcgccaaggagaaattcgatattctggtcggctcgctgcttactttcacctttcacttgatccaaatctaatattatgaccttgcatccctctcgactaaagcgatccacgatagcagcaccaaatccatcagcgccacctaagaaaaagtcccagttagtccagagctgaccggatgggatggatagatgaacctgtaacaatcaccacacgtggagtgttcattttcgcacgaagaggcatagttcactcgatttattttcgtaatatgggcgttttcttccgctcaattttcttcttatgttttaactgcttaaatcggtatctcatctcactatccccgcacttcgctcactccaccggcttcaaatttggtcaccggaattccctcatctcagatatctttgcattctcgcatcaggacaactcttctatccctgttcggccttccctggttattctgaatttccagacaacatgacatccatcaaagttgcgattgctagtaattcgctgggcaagtcgacttcggggcatacacttcttcataaacttgagacggctaaattgcacggatttgatggagtggaggttgcgatcgagtgtcttgaagcgcatgcttcctctttctcccagtcttctcgagcttctcgcctgcgtgcagctgccactcatgttgaccaaaaagcgcaagatttatctttatctttgattgcgctcaacccatttggcgcatacgatgggcttgttaaccctgtcgaagttgagtctcgcctagaggaggctgagctctggtttgatctttgtcgattgatgcgaattccaatctttcaggtgcgcactattgacattttgatggctccgtgtcagactgaccttgcttttttactgtagatcacatcgtgcctctaccctatcgatcctgttagaattacgccggaggtaaccacaatcgccgcgaacatgaagcgattgggtctccttgcccaaaaatacggtttgctagttggatacgaagcccccgcctggggaactcacctcaacacttggcaacaaatccatgaaatcatcaagctcgttgatcttcccaacgtttgtcattgtcttgataccttccatatttctgccaaagaggcaggtgatccatttagtgctgtggctcctattcggccaggcggcctggcaaatttacgccgatccttggaggaaatgaaacgaactgtgacgccaaatcagattgcttattttcagttaagcgatgcaatggttgctgaccagggccaggtgggctaccaacggcgtgatctcaatcaacccccctatatgacacaatcgcgaaactgccggatctttccctgcgaagcgaaccgtggaggtgtgcttcctgtacttgaggttgcacaagcggtgtttgatcttggctacacgggatgggtgtcgatggaagtatttcatactgatatgtggaatacgcgctcctcgtaagtgagatattcaatgagaatgaccttttctcttaactttaacttgtgtatagagtacccgacgactgggctcaaagaggaatggcttcatggcgagaaatatctttccactgcgggcttgatcggcataccaacgggaggttgtgaaaatattgaatgctatgtaagataacaatgttggaatcatcagcacttgaaacttaagtactacacacaatactctcatgtgacaaaaagcatattcaaactattaatatctatagaggattaataacaataactgtcgaccttccccttggtaactaactaactaccgcttttgcccccacgcctccttctatctaccgcgcccataccgccttataattatatacaccgctttcgtggcaaatagtaataagacagtagatacctgcaatttgtatgtaagcctctaacaaactcaagtcacttttgttatatcaactgcgccatcaaaaatgcttcattaatacctggggctacgtcctacaggaatcaggtagagtacacgactttttctaatcaacatgcatgttttattactatgtaaaccagaagatggcagaatacatggcagaaaaaataaagcgtggcagaaataggcagaattctgagcgatatccgatcaggaaggcggggtcgatagttataccaatccctatatattgaatgtcaatataagaaattgtatgtatttgacgtttccaacttctaagctctgctctttttaatttcttgtctagattccgctaccatccctcatcattgtctagctttgctcacatggaattatattcagccgtcaactgtgaatgagatatctgtgcggagtatggccccgcagtggtgtccacccggtcacttaatttattcgccggcgccgaggcatctataagtgagtatcaaactcgaaaatataaccattatgttaaatattagtcacttgctctgatgaagttttcaagaaatagttcttcttccgtttctagcccgacatcaaccatatccacaatggagagaattcaagtcgatgtcctcgtctgcggggctggcatgtctggaatggcatgcgctgcttttgcggcggaagcaggagccaaagtactggtcgtcgaaaagcaaggggatgttggtggttcgtcaaattattctgcaggaatgttgtacgtgattgaatcaatcttcaagccaaactaggttgttaatacatactgtcaacggacagctgggctccacagacatacaaaaaactgagagactgggtcccagaaggagatccagaattacaaaaggcctggttaagcgattatctaccggctgtacagtggatgcgtgaaaatggggtgccaacagcagaccggttcgacggcatcatgacaatcggtaaggctaaaagaaaaagaatttaatgaacagtgaccctgacacatcataggaattggattcccaattaaaatcccacaccttcataacctccatcgaaagcgcattcagtctagcaagacacgttccgatattttcaccaacacgtcggtggtcaagttgattcagaaacagcccggggtttcagggtcgagcatacttggcgctgtcatttgcaggaactcccccaattctccagctaaatattatgaagtccgagccaaaacggtggttttggctacgggaggtttccaaggttctccggggatgacatcccaatacttgggacaaggtggagacaacatttttgtgcgctccaatcgtggatcggtgggcgatggacttaagctggccatcgaatctggtgctgggactagtagaggaatgaatacctactatggtcatcttctggcagctcctcttcgagccgaagacgtgaatccaaaggactatcttccactcgcccaataccgtaagagcaagtccttgtcaactcagcatttctctctaatcagtctacagaaagcaaatactgcctactgttgaacgaggcaggtcggcgatttgccgatgagaccacgggtgacgagatcatcaatcagtatctcgccaagcagcaaaagcgccgcgggtttatattattcaagtatgtcccagacagaaaaaattggggcgaaattctaacctatggcttactattctagcgagaaaacccgtctccaacactgcgtcactgcgttgttccctaatgcaggggacatcgatcgtctgcagaaagcccgcgaacatggctgtaatgttggaagtgcgtcgacattgagtggtctgatagatgttcttcacgcctggggtgtgaacaatgtacaggcaagacggactatcgaggattatgaccaagtcgtgcgtttagggaacaagagcatttcccttgacgcacctattggtcgtgcttgttctccccctgcaccattggtagatggggaaggtcccttctatgccatggaggtccagccgtcgtaggttatatcttacacagtccagttccacctatctaatttcccataggatcacattcacctacggcggtatcgcgatcgatgcgaaagggcacgccttgacccccgataaatccagaattccaggcttgcttgtcgcgggtgtcgatgctggcggcttcagtaatctcggatacgccgggggtcttgcactcgcgttcgtcacaggactatgggcggcccgagaggtcgcacgcgacttggggttgcctgagcctcgcctaccccctcccgaccttcgagacggggaggataaaccaatccaagggcgtctttgagctagttccattgcaggttgcatctagaagttgacctcgttgtgattgcttttgatcaaaatagtattgtgcaaatctacaacatacactaaatattgtgacgtcgggtggctcaatccatttctatcaaggtcctcgcctttcagccgatgaatataagcaacgaccctcccattctctgcttccgatcctcttatggtaaaaaactcagttcaccattgatgtctggggcgatcaataagtgattgaaccctctcagtaggtacggctctgttgcttctctctcccctccccgtccccttgttttctaccctatcggaaagcttacttctctcactgaactctgacgtgtttccaagacttttactacttcatcacacatatggtaactatacacgaacgcgaccgggcaaccacttcatattcatggtatattcaatcatttgcatatattctaaccgcggctttagatacagacttcgcctcccaaattcttcactcggatcagaaacacccattgggcttttctttttccacatcgggatattctatggtgccaccaaaacgccgcgataacgcatttttccttcttccaatgtcttcaggctttgtttgataccatccaacgtcaaggggaaggtcatcttgacaggtttgatgttgtggaatgaggcaaattcaagcatatccctgtggacctgtcttgaagccacgatgcctccttggatccgaaggccattcacgagcagcggcatatatgggattttgagatcgtttgagtcgacggacagaggagaaatgacaccactgggagccatgatactcaagtacattgaccaatctggctgactgctagtcgtcacaatgaggttgtcgataggagctttgaccttcaactccttcacacccttagtcgcatagaattcgccggctcccagcttgatcgcctcttccttcttgctgtctgtgccggagaagaccacgacttgacagcccatctttgcagcgaattgaatagccagatgtcccaggccgcctactccaacgataccaacgcgagcggttggacgaacctgcgcgacatggagggcgttgaaaacagtcgatcccccacacatcaatggtcccgcatcttcgttgctcatgttgtcgggaaccttgaacaaaaaggcttcacgccacaccgcgtgggtaccgaaagacccttgatcgagatcggctagaccgtacatttttcgcttgctgcacaatgtctcccacccggtgaggcattgcttgcaagaaccacagcagtcatgctcataaccccaacccacgcggtcgcctttcgtcaaagtcttcgcgtctgggccagttgcttccaccacacccgttccctcatggccaagggccatgtcggctgactggtagtgagcatcggtgccgcacacccccgaatgcgtggttcgtactaagacttcgtctcgtttgaggtcctccagctcagtctccgcctgtttgattccatccttggagcccctgtatacggtgaatttgattgtcattgtgggaaatattgatgcaagatatttgagtttgcgaaattggaatttattgatgaaggaatcagatgtttacacttatcagcccacgagcctgctttataggccagcccgtttaagtacgtcagtacccatatttcataccggaaagtgaacaaagcttgtgtcatcacatattcagtcaagagaagcaaaacaagttgatacgattgagtgggcctcctgagtcctggtcgatgagatgggtagtgataggcactgatagcaaggcccttttcccctagacttccttgatttgagctgaaagctcgatgcaaagagttcataggtcaaagctataaaactctcggcctcgtttatgtatcccgtagcctttcctggcttggtcaactttacagacttcgaaggactgaaacttgatgacatcatacaggttcagcgtcaccaacatagcatatggtcacgtggcagagcaaacatccatggatgcgattacttcatgcccctccggatgcggaagatcttgtaaaatgttcctagatcctagctcgctcttcaacaaacaatactaaacctcgaaggaaaccattctggcggatttaagggaggacatatagtattcgaaaagctcttgaaatccatagattcgagagctttgatatccatatcatggaatatcctcattgagatcccattttgaaggcatcggcatcttcaactcagttatcgatgatggtactccgtgctaccgtctgggcaagtgattgacgctcttctccgatcgtcgctaattctgccataatgcaaaggcggtaatataaggccacacgcgatatcgggcatcccgatttggaaggtacgaagtctaaataacaaattttcgctcgcctcacactttaattgttgcatatagtcatattcaaaagacatatagattcttccctctgcaaagttcagggaagccatcttggtgggacaacatgattcaggtccatggcataactagcgccggtgaatcaccccacgtctcgtccgaaaaagatgcagctttggcggtagtgagcgagttcgcccaagaaattgatccggtcgtggaaaaaagggttctgcgaaagattgatttgtatttgatgcctgccatgcttataggttagttatacgcttcatatccgtgacatgggaattgttgactaactcgaacacaggctacggcatggtgtactatgacaaggtgcgatgactgcgccgatggctttgttagccaatatatacttatttctcataggctatcttaggtagtgccacgctctttggcatgacgaccgacttgggattgctagtgaaagactattccacttctcctccctctgctgatacttcacggctcagctgggcaacgtcgatcttttattttggaatgcttgctggcctatacccgatgacatttatcttgcaaagatttaatactcgaattgttcttggtccagttgtcctgacatgggccattgtctgtgccgccaccgccggtgtgacaacctggcaagggctttttgttcaacgattcttcctcggtatgtgaccttcaatttcttttactaatctcttatctaataaacgataggctttatcgaaagtgttattcccacgggcttcatgaccatagtcagcgggtggtacacccaagaggagcaggctcttcgacaggcatggtggttctctggcaccggttggttcactatcatcggtggcgccatgaactatgggtttggccaaatcacggctggatcattgaaaagatggcagtacatctatattctggctggtgccttgacctttttgtttggcctctggtgttgcaccatgcctaattctccggtttctgcctggttcttaaccctagaagaacgaagggttgctgttgagagactacgcaaggggcaaacgggtgttcggtgccagaagatcaaattcgatcagatcaaagagtctatgatggacattaagatctatctagtggctatcatgatggcagcagcgtgagtttcgtctctcgttataccaccctaataacaattaggcagcatacattccttgctgttaacctctctaaatataggtacactatcaatggcgctatctcgggctttgggccgttgattgtatccaccttcggctatgatacgcttcattcgattttattccagtttcccgtcggcggcatttgtgtcattttcattcctctttgtggttatatccctactgttgtccctaatacccgcatacccttgctcatcgtgtgctgcctacctgttattgctggctgtgtgatgatttggaaatcccaatggggatatcatccagttactccagttgttggttatgcgctaactggcttctttgggccagtggtcagcctggtcatcacaattggagctagcaacgtcgccggagcgacgaagaaaaccgtcatggcagcaaccgtgtttgtggcttacactgtcggcaacatcatcgggccgcagcttgtgaaaagcaagactaagtcacagcattatccagaactctggactgggatgatcatctggtaagtccgtaactgattcttcttgttggactactctaactaagtatagctactgtatcacaattgctgccgcagtcgtgttgtactttgtccttcggcgggaaaaccaaattcgggaatcattggaattggatgaggtgcaacgagacaagattgcatttgacgatctcaccgacaagcagaatccctttttccgatatgctttataatgacccttccatctacgagatggagactcatcgaaatcgaagctagaatttctggctgctctctaacactacatatctgacactcatatcacgtgcacatgtcctgtagaagataccaaaaaagtccaaataacatattcaaatatactcaaataccttcagttgaattggaactgtcctgaacgtacatagttcatcaagggtccctggcttgctccatatcctttatattcaataataaacgtacgatgtgccgatatgcgactccttgcgaaagcagatagtaacataacaacctacaaactggaggattagagaaggattccaaatattatgccacatgttttcgatcatcattgggctcgattttactactatagagttacaggaatgttgcaatattctaacgcaggttcggtccaacactcatgtctccagcatatttaatccaactcgggctgtttcatgatcatacgtgataccaaattccgggaattaaattcgatctaagataggctaggtgtattcgggaaccaaagagaaaaagaaagcacaagtacccttgaagcactttatgacttgcagaaagtggtagccatcgcatcacttgcaccactacctggctcccaaggcctcctattcgttcgctatgttagttagtcagttagtttccttcattctaactggtcaacttccatgattatttcttcctttcacttcgccctgagcacatatcctccttgcatagttcggtcggaatcaaatccccacccttgatgcaagacttgacaaggagctttgcatctcctcagctgaaataaaattgtgtgtaacaaggttcacggattcgaatctgttcgaattacagtccctcttacaatttgatctagaaacaggctccgtattagtctgtcggattgcgaattcctctggcggaactgaatgtagtttggatacataaaaaaagcaaaaaagaacaaaaagcccagccgatattgggtataaaaatatgtacaacggaaaataaaataaatgatataagacatcccaacgctcgaatacccacagtaccaacaaaatgagagaaataagaagtgtccagaagatttcatcttcatgctatagctgggacttctcactcctatgaacaattgtttcatgaacaacctttattccaccctggctactctggctctgtgacttccagtcgccgtcgcctgcggtgcatgtaggcggttgctgtcgtgaggtaggcaagatcatttgctcgtcgctgattgtattccattgagtgtctccgggaatcgatagcggatggcggaacttcttgcgtttggaatacccgccgccagtgtcggcatctgatagatggtagccagggtaactctctgactcattccttgatgtgatgtacagaccagcacgttttgtaaatcgtcttatcaatgggtatatcataggaatatttccgatgatgacggcgacgaaagtctcgcggcaggcccagctgccagcttgttgagccccatttgcgccagcctggtgaactgttagattgtgttatcccagcaagtaactctcaatacaacttactgttaagatgagaacacaacgcagaataccagccatcatgacaaagaggccaccactaaaaagaaccaagagctcgagtttttcccgccattttagtcgggctttaacaagcatcttgatgcatgtgttgttagcaacattagacaccgatgtttagagcgaggcttaccggtgctggaatactaattaaatagaggtcggtcgcgacattgagtaccacggtcacatagatgtcgatcttggacacggcgggctggcagtaatctaacgaatagtcagagacacggtctctcaggatgagaagatatgacacacttccagggtttggatatatttgccaattcttgtccattggatgacatccgaagagaattgaacaaaccgttgcaatataagttatggcaatgagaacgtgggcgatatggattcggattcgcatattcactaatcctgcgctaaagggtaggatatacgtcagtgacaaaggaccgaatagatgcaatcgaatcaaaacccacgtcaatcgagagtagaaaatggccatgcatgttttcagcaaccataataacagagtgtatagtgaccagccggccacctggaccttagagccgcccacacgcaggcgatattcttccgaattatgcgacaactctcttcgctcttcgtctgtcatcgcattattggcaaggcccatgaaccacgcgccgaccatgtacgcagcaccggtttctagcccatacaccacctgtaccccatattgattagcaagctgaaagcaaagagaacccaggttccaattcaactcacacatgccaccagcattagataatcatcagcttggaacccttttgggccaaccataatccatcttgcagttgttcgtaggccaattacggtaatggctacccccaacaaggtgaacgcttcggtattgaacccatccatagttgacgacttgcggtgatttcttcgggcgatatgccatcaaatttaaagaaaaggaccattcaacccagggtgtacattcagataaaggaagagaaagtcaattgtaccgagggggaaacgagcggcagaagaaagtatcccaatgatctcctctggcctcgctcgttgttattggaaccagaccggataaagaagcaagcccactcgttagtccacttatcaacaccaacgaatagaagaaaaagcaatgacagtatcgatctcaaatatccgttggcctgcttacttattgtggcgcccattaaactgaactgcaaacgcagtctaatatggaaatactctcacatgtgaacggaatttatgataggtccagttttgtcatgcaagagtggcagcatgcacaagtctcattggacagcgatggaatatcatttggtgctgggcccgggctatgggtcctaactgccgggggaaagttttaaggttgaaagcaccgtttgttccacttctagattactggtttttggaaatgtagatcggcagtcaaaaggtccacacatcccctgagtcgatataactttccctaagtgggaatgatcgtagcaaagggcgatttttcgatccaatatggagtaccctgatagacttcctttgtctgacctgagagttttttttttttttcggttacacacgaatactactccgtacggtcccgcatgatatcaactgggccaatgttgagaagcagcaataaaccgcaatgcgaacggggatttgtttgggttttcctgcgatctatgacatgcaaacagaccagctcagagacatacggagtagcgcagcataaagcttgcgtagtttagccaatcatatgtatgccattaggggaagatgccatacaattttatacccagggcaaatacggagtatatatgtatcgatttctctaatccacattctcttttgggttggtttgattgctgatcgagccggagattgctccgaggatatgtaggtgccaggagacttaggactagcgggctctcagaccagtcatatatatccgatcgatgccgttctttctataccgcgtcaaatgagtccaggagatatcataagtactgaatcaggccacggtttccggcacggattatggcttgacagcttccatttatccacggagtaataaccttaaccttgtgcataatctcaaacgacatgctactgtatgtttcaaattgaaatgtatgacatgttgacgatagcggtcttttccgacttccagcgacttggtgggtcccaaaacgggccgttcgatgttcatccgattctcaagcgacaactatgagccttgtactctgtactccgtactccgtacactgctgtattgttgtcaaataatttgcatgagatcaatcaattgaattggactacgaccagtagtcggattgagataccaaccgaaaacggcaacctgcatattgttgatcccggcttccacaaaattggtaatccaaacgccagccacggggtttccaccgtcgaaactatttaaaatcacagtggagtttggcttcacctcgctacgcacggagtactccgtactccgtagttttcttatgaaggctaggatactacctaagattagaagaaccgacgatccccgtgggcctggccatgctttgacagacgctttgacagcagggctaaaatagtcaaacgacggagaatctaaaagattcagtgctgattcgaattctcccgaagagcccctgacactgaaggggtatcggtacatctcggtacggagtacaaagtagtcaagtgcatgccaagcactccgtagtaggtagtctgttacccagatggggcaaggggtctgggactaggttcacgggtagccattatagaatcatcagcttagaatctctggtcctttaaatgtctcaggcccttttgaaccacgagctctgtctcaggaggtacaagccatgctaaagttggcgggaactgacaacgtcgtggggtttttaaggtgagttaatttaatagtcccaccattccatcctcccgggtgtcctgaacagcaagggctaaaaattcaaaacccaaaaaaagtactactcgacgctaatacttttagttatcgctcattccttcgtttccagtaatttggccgctcgtcttgtttgcttgtacataaagcatcaatcctggtcgcgcaatcggtttattttctgcctcttaaaacgaaaacaagggagtcttcaacaatggagaccgtggatcttgttgtggtaggcgcaggtaagttgaatcttcactgtcgcatactatttcgctgacaagcattggccaataggttggagtgggctctccgccgtcaagacctaccgcgaggtcaatcccggccacaatgtgctcttgttggaaactgccagctctattggcggggtgtgggccaaacaccgtttgtacaaaggcctcaagtcgaacaatatgcttggcacgtatgagtatagcgacttcccaatggacgaagcgacttttggcatcaagcctggacagcatattccgggccatgtaattcaaaaatacatggaagcatatgtacaacattttaactttgccgattgtattcgactggaacaccacgtggaaagcgcgcgacacaagttggacggaacgtggcagttaagcgtgtcgcacggagcagatacaacaataatcgataccaagaagatgatcgtggccaccggcatcacgtcacaggcatacatgcctacgttcgaaggccaggagtctttcggtgcgccgcttttccactgtcgcgatctgctgcagtatcaagatgcagttctgaaatctggagagcgcgcaaccgtttttggcggaaccaagtcggcctgggatgcggcctacgcttgcgcaacggcaggtatgaaagtagactggatcattcgcgaatccggtcatggacctatctggatggcgcctccctacgtgacgcccctgaaaaaatggctggaaaagcttgtcacaacacgcctgctgacctggttcagtccctgtatttggggagaggctgacgggtatgatgggattcgcagctttttgcatggtacctggctgggtcgtaagattgtggacgcgttctgggctattctggccgatgatgtcgtgcagttgaacgagtacgacaagcacccggagacgaagaagctgaagccttgggtgagcccattctggattgcttcctcgctcagcattctgaactaccctaccaatttctttgatttggtcaaggatggcactatcaaggtgcacatcgctgatctcgagcgtctctcggatcacactgttcacctgtcatcgggcgatgcgctgtcatcttcggcgctgatatgctcgacaggctggcgttgcactccaaacctcaagtttctaccggaaggcattgaccgcgagttgggattcccttggagtgtggatccgctgaacgaaaagctgttgaaagcggcggatgaagagattttgcgccggttcccccgacttcgcgatcaaccaaagccgaacccgaactacacgccgttagacgcgcagtccgaagcggctgtgccgcaccccttccggatggcgaagttcatggtcccactttcgctggtaaaggaacgctctctggcgttcatgggtatcacgatgactatcaacacaactctgattgctcagactcaggcactgtggatctcagcctatttcaaaggcgatctgaccccagctacacacgaacgctgcccactcgctgtgcgtgctacgtctgacctcaagacggaagacacttcagaaatcgaccttgcctgggagacagctctgtttactgaatttggcaaatatcgctacccgggaggattcgggcgacggaaccctgacttcgtgtttgatgcgatcccatatattgatctgatgctgggagaactgggtctgtcaccacaacgcaagcacggcttgttggcccggtgcctccagccatatggtcctgaagattaccggggtctggtcgaagagtggaaagctaagcaaagaatccagtaatgttgcgggtgtcgtgattcatttatttcattcatttcatgttgtctgatgtgtactagtttgttccccttttccccttcgcgtgtcgcaagtgtctccaagacactcccggttctttcttttacataagattcaagacaatagaatgatgttttctatactatgtgtgagtatgttatatgaacatgttataatattctttgataatgctcattttcggcatcatccaccatgacaaattgctccaaaaccgcaacaccaacgagacatgaagatgaagatgatcgtacatcacgttccttcgggtcaccacctccggcccccattggacgctggctttcagactcaattacctccccaaccatgtctcccgtccatctcatataatctttcccattccccgcgaccaccattcttactgagacattaatttccaactgaccatttccctctcccagatcatatttcagtcggaatccttccggtatatcacctatccgaggcggatatcgcccaccagtagtctccggactacccatcggtctcacggtgagaatagcggggtcacaggcggatataagcagctccccatctttggcaatgtagctgctcacataagtggcgttgcttgggtcattcatggcgagataactgaaccatacgatcgaatatggacctagacggccgtgaccccagtaccagctctggacagagtctgtaaaaggttgatcagaccaattctgtaacttgatcagccgaagtttcacaatttttccaccaggcggcaaaatcacttactttgtcatggtacccaggccctcggaacttcagcgtcgacccatggatctgcatgtcgacctcacccatggcgtcgggtatgagattgatccatccgatatgaggtgcaatctcaataacagtctggccctcttgaattccacagggcagattatacggtgctcgctttttggcaaatttagcaagctgtctgttcctgcgattcgagtcactacataccgaagtcaaggtaaaccgcccttcgacctgaagcttctccgacgcgacaataatctcatactgcgatagattctctgtgagagcagcccagctaaatcccgtcgaggcccactcgccagagctattggtgcccgcgccgtcgacgccagtcacggtcgccacggtcgccgggacagaatcggcaaagacggtgccgttggcgaacgaagcccataaccaaacattgagcacggaggtctcatttgcatcgaggaatggaaacccttccgcggatgaggagaagaatgtgacgactagggactcatcggggttggtctccgagacggcatcgaaataccaccattcgaacacggtgccattgattgaatctatctggggtgcatctaacctggaaattgattctttatcaagagtggtctctggcgtaggaatgtcaaaccgagccttgctagttccattttgtacagtgctggggatatggtaggtcccgctgcgagagtccctgccagcacggaggagatatggcaaatgtctctcgttgaccctatgctgactagggaatgctggtgtctgttgtgctagaagagcacatatcaagagcagtggaagcatgatggaatacacctagggaagaatgcttgatgatggatctcaactgagaaagaatttagtctacccactatcaattgggggcggatgggaaaagagagaaacgaggtgaaatatctcacttgcataaggtgccaggatgcagcagagctgatccccatgtgggcttcgccatatatagcaaaaaggggaaagcagcgggatcctgggggaatcgattcaaaaagtataatttcaatttccatcccaggtcaaagagagatggcgatcctttactggtacggagaatccttctatcgttccttggtttcgtgatggcccaacacaatgatgtctattttagtttacaatggggatctatacccttttccccgaagacacaaaaataggaggtcacaagatccattcagtagatacaaatccatcttagacagattcactcatacgcgttgtctaattagaatgagacagccacgtagctacctagtgagtggctgagagaaatcagcatagatctaacgaacttccttatttcaaggatcaataggaaatagatagccaatgatgattgacaaaaccagggtttgaaagctgttttattaaataaattaagacgattaatatacttcgattggaattcctcgggatatcttccatctcataattgacgcaggggtgtttatataccgacattgcccatcccattaacatttcgcttaatcgctttaaatcacagagaagcaggatagatacacacgtcacacatgagtctgataagcacatatagtaaacataaatccggataggggaaaaaaagggataaaaaaaaaagttcagaccttcccatgatgcccaaatcacaaacccttcgccgaagctcgaaataaaagaaaaaaaaaacacaaatcaaagtcaaatccggtaagaaccccgactcccaatgccttggtagatacatacatgtcttcaaacatcacccccataagatatgcatatagggagagttcacagcaaggacgaaagtgtcacaggcgggaagactggaacacgttcaacctcgtccattaaggaggggactgccgtcttcactccgcccttcaccctttatatcggccccggtttggttgctattcgcatccgagtcgccgtcctttccgcagcctttcacaagaatatgtcgctgtcggcaaaagtcagtatgtgggaattgtcatatgagactgcagatgacataccttaagagcatccttgcgcgagaagcttttgtcacaatgcgagcaagggaaaggcttcacggccaaatgaatacgtttatggcgcttcagatcgtgattacggttgaaactctgggggcactggtcgcatttgaacggtcgatctgccgcgggggctgccatgccgtgcggtggtggatggcccccatatagatgttgagagctggcgacatggccactgttgaatcctggtagaagcccggtttgcattccgcccatcatcgacatgggcccaccggggctgtgcacgttggtcatgacgggaccgttcatcgccgggagagaataggagggccatggctggcggggatatcctaagggcggttgcccggctgatggactgtgaacaggcattcgtcctggtgggtggatgccaagcccggtggggccatacatgggagagaagccggcctggtgaggactgtgcataggaggagaaacggcatacatatgctggtgtttgggggcatatggatcgttggattgcagtggagcgggggatgtagcgggtcccgcatggtacatggtcatggcaggttgtgacacggagggaggcatggttgacggggcgggtaaagcttggtaagataatgtcggcccttcatatgggtgcggcaacccatccgtcgtcggcggcgatattaccgatgagcgctgcataccggacgacggcgagaaggaacttcgagccgagtatggatttaccccggatccccaggactgtccgtatggattggcggctgaccaatatgccggcggcagctcggaggacgcgcctgtggaaggagccaatggctggggtgtggcgtgttcccctgcttgaattgtggcgggtggcgttagtaagttccccacgctcacattcactggcgcgtgggagactgggggatgggtaggatgtccgtacttgggtgctgccgcgccagcacccaacgtgaacgggggaggtgggagctcaaagctgggtaatgttggggctgcaggacgacgaatgttcaacggcggggctgacagcgcgtctaacgctggccccattcccgccggcgctgctagagtcgccagattggcggatgggtccctcactggtacgtagaattcggggtcgttgatattggagagctggccgaaagaagatccgttcaacgcccaatctcgatcgccaggtacggccccagaagggctggtagaatccaggaggggcgatcgtcgatcgctggggctcgcgatcggtatatggaagagagtcgagggactccggttctccaagaaataggggaatttccggagggactagagaactctcgaaataaagtgacaatggtaataaaagaaatccgaaaaaagacacgggaggtgagattgtcacggtcgacgaaagcgcgtgtagtacatggtctcgggggggagaaatgagtgaaagtcgaaacactaagaaagtgaagctgagaggaagagagatgtggggggggggaggtgggcaaaggaccgtggcgttggaggcgatagcaagcgcgggggaagtgttatactaataagagatgtcaggagttgcctaggtataattaacagaagaagcacaaaagtaaataagatggatttttctctttggggaatggagtcgacgcgggtctagccaggtggccaccgtggggaaaggaatgggataatgaaaacagtcgtatatattgtatattaaatagaaaagcacggaaaaaaaagggcgaaaaaggcgagcagaggggtgtcagcagaacgtggttgacagctaactaactaccggttggcttccagggctgttccggattgtcgactggaatttatattatttgtcttgatatatacaatccagggatttggtttcttcgtgcctactttctgttatcaacttcagaacaagatagcccacaatatatgtatactacctatttgatagctgaaaacccaaaaagacccttcttcctcgagggaaatcccttgcgtccgactgatcgcgtgaaaataaatgcgctagtgtagggactccggagagaatctgtgctagcaaaagagtggatccggctgagagaaagaaatttatttcgtttgggaaaagaaaaagggaaaaagggaaaaagaaatgggatccatacttttctactatcacggtaagattcccatccaataaggagaccaacatgtcaacgcacggacaagaccggaatggccagaatacgagaagcccatagagaaggcagaggcaagcgagcttgtcttgccggtcattcgttggaaaaaaaaaacacatgatcgcgcaattcagttaagctgctttttcatatttgtctttttgtttgagcatccctgttataatatacagcctactcggaccagaggtatattggagaccaaaccgccgtacctaggtatggtctatgttgtctatctctggtctgcggattatggtcagctgcacttcttttttttgccctttcagcccccaatagccaaactaaaagctcgatttgattggtccccggagttcaccggccgtggtagcttctttcgtttccctcgttttggctttttcgctctttttactttggttcgggccttaaaggtcacctcaactctcccgacctctttccgaaagccaatcgcctccagcatccactccctcgggtttccctcgcccatagatctatatagatactagtagtgcttgggtggcggaacgccaaatgaaacgggtctcggctccacgcgagaacctcgcttcagtctcccgacagaacatgtcttatcctccaatcaaccgacagagtcatctctttcgctgccttctgcacggacgtggcagatgcttatgtagggggaaaaggggggacatgccctgtcgatcgatatctatcaccgtagccatacgtactctgaatctacataactagacaagacatcaaacttgacagagctgatctgccgtaaacaaatcataacgtggtcagattccgaagacgttgtagatatgtcccgaatactccgcaggggccggtggttccatctatgcatagctggttccttggcacagcttagacatgtccattggcacatggaatttcatattgcgatccggtccgcatttcccccgtattcggtagcgagctcggtgctctcaaaaagaaaagaagaaaaagaaaaagaaaaggggggcaagtcttagacacgcggcggagtcacattcttgggaactgcatacctccgcctaggtatgtctagccgacgacagacacagcatttctccattattgtacattctacacaatccatgcaatatactgacgtttgttagacaatcccgatttatcttcgattcaaaaataaagtccaccgcgtctgtagccgcacgtcgcctgcccgaaaaggttgatatcagcgacgatcggttgatcatcaacaacctgtggccccatcgtatgctggttcccggttgatcggcctcgcactgccttttctcggtttggaagtgcaatccctggagctatggttcgcagccgattagtcgatcctctcatgcaaggcggctcctacagtccagatgcctctcccgatgtgacagcacgcaaggatccacctggctggttttgaacgccttagtgtcgcctgcattcggctcttgccggcgtggcttcggagaggctcacggttggcgttcacgatcgtccccgggaatggcgtttcgtggaaggttgactattcttctcgcccgggagatctgcgaccatgagtcttcctgcagggctgatgggtacaatatcccggcctcggtggatttgagggctcacattttacggtgtttccaaatatatcgactatacggagtaatgtgctgatatataggtctcaacctcaacaaagctaatagagcactggtctctccttctgtttcaagggctaggatcactgcttcccaatcagaggctaagctagagcctccctgtctcagcaaaaaaaaaattctatgctttttttttgctttttatctctctgtgggaacagcctcacgagcatttttcggtcgctgtaaaatctttccttgccgcagatctgcttgcattgtgttgccttgggtgtgataattaacaagagacgttaattttcgcatcgtgttgctctattgatcataaacttgaccgattcgattcgctgaccttatattagtctctcatggacctcataaagctagatttccggtatgacagtctccgcggtgaaacccttgagtggtctcattaagacctggtgacgtttgtgatacttgtaagttgttccctttggttgactgcaagaaataagagtttttcgctacacaggcccactcagtaccccagcttttcgagcatgttatctaactggaatgtgtaacttaaatctcattgtcaaccatttgtgctacttgtcttcggtgctgtatataaatgacatagaagcgtcggccatggtccccatatatatttccataggtcgattacccgatcgcataagagaccgaccaaacaggccagatggatcaatctcgggaattaagccaggaatagaaaataatatagaagacaatctaaatagccttgggatgttctaattgcatcgggctttgaattgccgagtgttgctccgatgacgtcgaacggcggggtacaacaacctggagtttcattcctacattcacagggttactttcttcaacttcgcttttaaatcaaaagccaattactcgtatgttcgtttctcgtccaaatcaccccaaatgaaatacaggccatttctgaccttccaaagaccattgcttgcaactaaacaccgctttaacacacctcccttccattgcttctccacaaacatgtctggaatcagcaaagcatgttgctcgttcgtgatccccataaccattgcactctgtgatgccccaatttcgcgctgactatcaccgtgcacagaatccctcctattgtatccaagggctaccaggccaaaggagaatataagaccatcaacggcctgaagacctgttggttcttgctttcgccgacctcttacgattgagctaatgaaattactttcagatgtcaccggcccagaatcggccaccaaggctatcctggtcatatatggtaagccactccccacaagaatttcaacctggccattaactgacacaattgtgtgatctgcagacatcttcggtttcttcgaccagaccatccagggtgccgacatcctcgccaattcgaccgaccaaaaatatcgcgttttcattcccgactttttcgagggtagccccgccgacatttcgtggtatccccccaccacccaggaacacaaggagaagcttggacacttcttctcaaccaaggccgccccaccccaaacactctccaagatccccaatgtcgtcgccgaaggcaacaagctagcgcctggcggcaaattcagctcctggtcgatcctgggtttctgttggggcggcaagatcgcctgtctgtcctccggcgctgataacaagctattcaagacggtcgcgcagtgccacccggccatggtcgaccccaacgatgcaaaggccgtgaacatccccatggtattcctggcctcgaaagacgagcccgcccaagacgtcaaggactttgaggcaaacttgaaggtccccaagtacgtcgagactttcccaactcagatccatggctggatggctgcccgatcggacctggagaaccccgaggtgcgcaaggaatacgagcgcggatataagactgttctcgaattcttccaccagcacgcgtaaacaacagaaaaaagggcatagttgactctggggagttccttaccgcggaggtttgatggtggtatgcgaactagatttgaatggagaatgatgtcttatgacaaaccaaattaccttcctatgcacaggtacacatagcgtccttctagtgtatgcacaacaagcataagccgtataactttgacaaaatactattattaaaaagctaaccttgaaacaaatctcgatgactcatgtttgaagatacataaggtgtaaataaattacttgggtataacgacatgtagccgagcatatgtaatttaactagttcgaacataactatgtacgtatacatttgatatcgcatacggagtacgtccggagtacctaagtaagatatgtgcatatgtataactaagtaaaaagtgttttactttttcgaatgacccacaacatagttgcactttgtacaatccgccagtcttccaatatcggccaatcatctcattcgcggatggcacctagacgggtgcccaggtggatataagttgtatatatatgagtccgcaagacgtcatcactttccgaatcttaccttaaccttcttaatcttcttaaccttcttgatctccttgatccccttgatccccttaagctaccgttcctttattttacaatttaattctgggatctataaattctccgaagtcgcttaagttgtgcattcaccccccaaaaaacggcgctctcacctgtcgcgtttcagctttcagcgtcaccccaccagccgcgaagggcggagatcggcactccgcatatacttgatttatttccacttcttaatcttttacttttaccagggcattctatctagaagatgcgataattgcatcttcacttggttctaatgtcttccatgtttggccgccgtcgttcctcagatgcagcttctcctcctgctcacaatgagtttgagtcacttaagcgatcattatcgcatcgccctcccgactctccccaagaggatcatcccaacaacggggggttccgaaacctatttcggaggcacattaatagtccagacataacttctccaaccgcaacacaagtaagaatgtcttaactattttgtcattagaactgttagctcatgcgaaacagggaaaagaaaaatcaagtccaattgaggcgagcgcgccggcgccgcccaaatccccagaagagagtagtggccggcacgatgacagcaaagatccccatggcacccctaggcacgactcgcccgtaacaggggccgagccaacgcaacctggaaatatccatgatcatctcgaatccagattggagatggcgggcaaaccaaaagaaaacttgcctgttgcccaccacaatccaaaagaggagactaaactcacggcgaaagacatcaaggcaattttttctggggcacctcactttatgctggagagaggcaattatcatttgtggtatccccaagtgatattcccatgggatgatcataacccggtaatccaacacatgtgggatcgcaagccattaccccatgcatcctttactctgagcacacttcacgctcatctgccgctcccagacgactgggctatcaagggtggcgttccgatcaaagtccttgattggcgccaaacagacgctaccaacagggcaacgttcgacgtcggcatcttcgaagtacccaacatgctgtctaacaatggcaaagaacctggaaccgtcggtttccggcactttctcgaattacctgtggccgacacggtccgatacgtgggccccgaaaagccaaagaaatctccacatctacagcaaatctcgaccatggcggcaaccgtggcgtttgatataatggagggatatggaaaaccctattcgcaatgccgaagcggtgccgtccacgatcgacataaactcatctgcgaaggccccgaggcctggaagcgcattggagtacgagatatcaaccttcgaactctggtgcaacgcctagaacatctgcgccagtttcgacatgagatgctcacagaggggtcgacaaagacaattctggatattgaaagtccgcgcgagttgcacgacagcttacacacacaattccttcacccccaagctgccgacattatagggggtcatgcgcaaagcatcaaatcccagatcaaaactttgtcaattgtgctggccaccccaggcgcatggatcaatttcagtctccccgaatggcgctttcgcgtagggcaggtcctatgggaggcatccctgcatggcgatggggactgtctgggccccagttcatgcgatgagaaagtaccgtgggatcttatgatcaagtccgggatggagcgaaagtggttgctgatacagatgctcctctcggccgagttgcttcttcgcttggatgcgttcgttcgagctggcatgttgcgtgatgcgcactctggccatatcacgatgcgcgagcttggagaattcgagaacttgcgagacggcaaactgaactgggatctggttgttgtgcgccggttcctcagcagcctcgatatcagttgcccgccgccacaatcagggctatctccggatggctcacgattgaaactcgcagccacgaagtcgcatcgtttttcacttttcgaaaccatcagtcgacatagtccgccccctgttgcggatctaaagtccgcctgggactgtgaactgagctcttcgcacattcggcaacaactggagggtctgtatgtcttcgcagaaaacgttggatggccaaaattggctgcactgaaagctgccatggagttcaaacttggagaccctcacaatccggttctgccagccttagtcgttcatgataggtggggatgggaggagatatctcaggagatgttactggccaaggaggatatgtacacacgagatccctgccgtcgacgcgtcaagcttagtggctctggcgatccacagtccaaaacgttaggctggatctcgcgctcctggctttccgggttcgtcatacctggagaggggattagtcatcttctcatggcgacgctccttgagaatgacgcggatgcaatggataaactgggatcaattgccaacctctatggagggttcgtctatgaccaacggagttggtggagcaaagcatgcgttgccggacgtgtcttgtctagttcagcgggagctaagacatgcatggggtggatcagcagcgacattatcccccgcgatgcgattacaggggaaatattccagtgtggatggcttgaagtcccggttgaagaggtcttggagatttcgagcgtacctcgaatcaagcaaggaaccaagcttgcgctggaatcgtcgccgctaggcgcgggagctatctcagcaaaggcctttacacttccaacggataatcctgagccaagtgcaatatccgtcaacatcgaaggcttgaatctgtctgtcaaggattacaggcctgccggcgagtttggaattacatctgccgaggcatccatgtcgttcttaattggaggcgcaggtggcgctggagtttcaactacggtttctttccccctcaagtataatgttcgctttatctccgcccatgagtgctgtccaccgttggggatcgcttctcacaagccatccgaccgcgagaacattgaaacccaacggcctacaaaacccgtgtccaagtactcacgtctaccggggcatcctctgcacagctcttatcggtacaagtacgtttcgttggactctcttccctctgccccgacgccgcaattgacatcgctggtaaccccggaggcaactcataccccggagattattgtcatcgacgcgcggggcaaccgagacagggaaacgttcgctcgggcgtggtgtgcttctgttgggtgtcatgcgatcataagtcggtccggaggaactcgtgtgacaagttgtgtcgcgtgttcgataaggcaagcgagggcgatggatgtaatggttgtggtacgtgtgagcgaatgaggtgaatcgagttggtcgcgcatgttgctacttctggaggcgccattcggggactgtccgtaatagagcccgaaacacaaaaggtcataatcgcgcaaaccgacctgtttccatgattgagtacaatatacgaataataagttcacggacattggcccccttttgggaccggaaaagcctttggtggcttcaacgggtttcctctccggagaagccgtgggggtaaggggaaaagccctcccatcggagaacgccagctagagaacggtaaataccaccttccttttctcctccagctgaaaacaaataaaattttaaaataaaaataaaaacgccgcaaatcgtgataggggggaaacggagagaggaatgggctttttcttgggaggacgcgtaaggcaggttgcaggttaaaaagggtgaccctcccccttgagggccgatggccgaatggagtcaagggccccgaagatggtgaaacagtcggtctaaagctgggaggccagtgagatctctgtattatgggtccacagggatagatatctccgatctcacacaatttatggcatgtactctgtagttggacgatgtacggagttctgttactatatatatatatatatattgtatatgaagcatcttgtaggtagaggaaactgtatctcatctgcagagtcctttctcccatacatattagatcatatcgtcttctcatctgcatactcatgcattcttatgcaatgcagtctcttgagcaaattaagcctctaccgagacttcatggttcagggatgtagagcctacggggtagacactccaaaatggcactaaccccgaaagtatcctggtagaattaaaccatcggctattccgtttcctaaagaacgatcatggcagcacgcctagtacagtcaagcccgttacaatcgaaggatcgtcagagcaaatatatttcgaaaccgaaggtatttacgcccggcagaattccaactaaaaaaggcgggacatagcactaagccaatagaatcaacccaatctacccatcacgtgggcgttaagcctaaaaaaacacattgaaaagaaagtttgggcggactaggcctaattgggaagcctcggcgcatcaacgatggtattatctaagcgaatcaattcagggctggcgcgcaacttctttggatattgtcgaggtttacaaaaaagtgggtcgatttcaacggggttttggctgtagctcatagggtaggaatacatacctgcacgccactgcggagcccggcagttgggggttggggctttgactgctaatcccagaaaggaatagttatgggtatttctcgaattgtacaagactacaatattaatatgtacctaagtaggctagttggctagtagacgtgattaagcgacatctgagactgtaagagtcttctacatctatccacccacatgagtgtaactattcttggctaagattagcaagatctggctcagccctggactggacccttgtttcagtttcaaacactttggccgatcgacgacgacgcgacgccccgttgggctttacctaattattcaagcgaaccgagtacgaacattcctgctacaatatgtacggaatatattgtaccaatatattctcgtatgtgtcctatttctgtatggctggtgctgcaatatatgattggagtcgcttgcctcacactaccccgtactgcaagatctatcgcatttacattcgccgcgtcacgatacatgtactgattgttcagctgcagacaaatcccagctgcaaagagtctctgttgtaagacccaatagtatcggctcttgaccatttctcaagaccccgtgctcgtcgatcttcgaccagtgtgtgttaaattgcggggccagagcgtgggaagtccagtgttggatgtagtttatcttcgcaaaatggcggtggaagcatcccattaggcaaaagcttgaaggcacagcatgtattggatagtatgtatacatgagactctgctggtgaattatacgttgtcaagtggcttggagagcacgagagtacggtgatcggtggcgtttattggccttgaggggttttgttgacgtgatacgccatacaacagtatgaagatcatcgtccactccagtccacttgccagaacgatattcctcaagccacgccggacttgacacgttttcctcttcattttaaccagtattcgttgataatagccaccccctttttttttcttctgtcatctgttcgaacaggcacattatcagacggagtataataagcactgatcttttccattcaatcagaaccttcccttctattgtatgatttagccttaatggaagctgagacagaaggaaaaagccccgagatgagccccatacgaataccaagacccaacctgtaacacgctaccacatccagacgatccttaatcaaaccttgacctgccccacacagagtttgtgagatcgcttgcaattcgcattttgttacctatgctgtactatattatattatattattatttgtagtactccgtagtctgctagggctttcggacggttatcctacttgggtgtagttcagggctgtgtagatgcagatttatgtctaccgattggtttgcaaaatatatgatttattgtagtagaatcaaatcttaaagggccacgtacgtgtttctagaaaatgtcgctcactacgccatcatgaacgttgaaacagtgagattgtcctatgagcattggatgcacggggtacaattaggtagagactgctcatccgaacattgtggttggatccatgaagaaaggtccgtggtcactgattggtccactatttccatggatcttttgacaggtttcctctttttttggcctgataaatgcaaccaaatcggattaaagctactggaaaaggggcaaaaccaaaaccacagaagataatttattattcttttttagataattcaacgttatattaaacaaaccacaagaaaaaaacaaaagaaaaaggatccaaaacacgaaccaataacctgatacacatcaaccgtggaccctgaatctgtttttagcacaaaaataaccgatggttcgtttcagttcatatcatgttacggagtaaaatatgggatagcgtgatttccagtcttctagaaggccatgtgggcaacacaacttatgctttagatcgaaccgcacagctccccttcgagaagccccctgggtttctaaggatcagcctgtgaaatgaccggagacagaaggttcttcttgatggaccctcaaatcaacgagcctattggttctgagtgccgacctaagctcgcgtcactcactaatcacctagtcgggacttgaaggaagcattccccagttcatcaatgattgacaggcatccttgttggccctaagcctaactggtatcgtacactttgagcggccactccaacatccacacatccccactgttgtcagggctcccagaccatggttccttgtctctgcttcatttcaagaaccgggtctacaatacgcaatcaggggcattggaaagttacctaatcaaggacggatctaacggtgacaggagtctagaaaaaaaaaggagctacgtaggtgaaaaagagattacgaaaaaaggatcgaaaaggaaaaccttgcagaaaacaagaaataccattcaaacgccagtaaatctagagcattaagggaagttatccgcggacccctgaactgatcatccattgacaatgacctgcagttgatttgggctaactcgatacatccgtgttagtcttagttatgagagccaccttgttccacgtacggcgtgatatacatgcttgaaaattaaatttaatcaaaaatctcagggaaaaaaaaaaacctcccaaaaaaaacccaaaaggcctttgggcgtttcaccccgcgattagcttctacctattggactatacctaccatcttcgatctgctcttcttctcttcacaccgttcgcttcatattcgctccttttgaataccctaattttgttttctttttttgttttctctctactaatctctttttggttatcgtttgactcgtccccctagtgtggtttcttcctcgatctcaaactgggccacaataaacttctaggccctaaccccgtccaaatccccttccacgaacactttactataattatcattgattaattcgcaattgctggacttgggaagtttggaactcccagcctggaatcaatctatcctcgaccattctactgcaacatcacctctatacttggagacacacgggccctgacatacgcccgacatcctcgctctgaaacgcgcgcaatatcatacttgatccagtgtggcgtatgtggatcagaacttgagaattgaagcagcgtcatcctctggaggcactcatcggtcatactctctgtgcagtatttgtatggccttgcgcggactcttgtcgcatacacctttgatcacatctcgaggtactctcggccggctgcttcgcaaatcacacctttcgcttcgctgtggcttttgatgcaccctcgaccgatacagcgacagaaccgtgctcgttggagctatgccagtagctgtcgaccagatgacatcgacagcaaactcacaaagcaccatggacgcaaatgataagaagcgcaataagttgggatatcatcgaacctctgtcgcatgtggtcagtaatatatcccacgcacccatcgcctgtttgcttgtcgcctttctctcctcgttttcgaagtgcgaaactgtgtcgatcaggaggaaataaacaagccatcgtttcgggaacggggtattcacatgtgaccatgttacttatacctttacagtgcactgtcgacgacgaaagatccgatgtcttgtagcgccagatgatacggaaggacgatgtgaaaactgcattcgcttgcgaaaggactgtcagttttttccagtggaccagcaaccaccgattgaaaagaaatcacgaccaagctcgagattggagacaccctcaaccgagcgctcaaacaccacaccaattgcttcctctccgactaatttgatgcccgaccccgccgagactttctacccataccagcctatgccgatgaacgcctcgtctgtgcaggacatgtcaacgtacaacgtcggaatggttcaagccaatatgagtctaacaccaggtaggtttatgtcgtctagacttctctgcactgcaatccaggttcattcgttgactgactgatctgaactagatcgacctatgggaccaggagactttgctggccatcaaccaatggacacgggggtctcgtgggacgaatttacgactatagcggacccgcaactgttgaatacgatggcagccggaaaaggtcatatgatgaatatgtcacccaacttatggaatcccgggaccatacactcaggcctcccacccgcttccccgatatctgcagcatcttcaatgggaggccaagcacagcctatgagccagacggcatacgctatgcagccagatggaacagtttggcaggtcccgccgccaccaccacgaaccatgagctatcctggacaggaaatgggatcatcataccctgatcagtttcacccacaactgcccccggagctcaaacggagaatgaccacacccgcacaatctctgtctgccacgagtgccatgggcccacacggctcgccaggcacacctgagatgcatacaccaggatcggtttcatacccaccaggaatgagctacccgcaatggcaggatatgagtgccatgtctggaatgagcgtggtgccatatcctatgtactctggcgacacagttccacaacacgcatacccgcctaatcctgctcctatgggacaccccggaggcccgtcaaagccatgaatattttcattcctttcttcgacatattatacctcctctcccacgcctaacttttttttcgcatttattcgagtccaagttccctcacgttgcacatcacattcctagacagcctgtttcatttctaataccccgcgggacgtacacatactttttacccccaattggcatttcatctattttcacctcatcctcatataccgtggcgggtctgctttgcagctggtcattagcgggcgcaagggttttcgggtggcatttttactatgatttcttgtctcttccttttctatcatggcttcatcccaccttttcattttctatccatttcctcgggctctttctacccggtctgtttttgcgtgcttttctctatctcatctggtggtattttacccttggttgtatgcggtatgtttgtttctggccggtggttgtctggattggagtgtgatttcacctcatatgttggagcttttctttgggccatcgatatagacttccttttctcttcgtttcctttggacaatttatgtgtaatcttctcaatacatgatacccttctgatctctgtcgcttctgtgtcatcaggaagatgcaactcctgcttgcgggaaagatgtcgaccagctcaacaaccaatagaattaacggttggagggttgatacaatcttattttctctggttctttgataaggcacaggctggaaatgcataattcttgtgtacgtatttcacaataactgccctgcatatctatactttatcgtaagactcggccttttctccagagttcttgtctatcctcaatgtactaagagcctacctgtactatgagcttcttgtttcttgcttacagaagtgtgcatgtatggtgcacccttgctatcaaaggttcattgtaggtcacacaatcgttgtacggagtactccgtacgaagaatctcgcttgggtcgattatttgtggcaaagctaagacaaaaatgagagtagtgatgcataatacttcgcgtacaaagttaacacgtcatgacttcttgacttctttctcgaagttccattggcccgggatccttcaatccgcacacaaaagtcaagtcgggttattagctcgcaagagaagccaatcaaatactcgacactcgtcaatagtattgcgtctgggagggacagtttatatccctgagcacacgaatatgccaaggccatccgagtccgtgataacaaatcctgacacagatagataggcagatagataataagcagatagaaaactgggagaagttctgataacaaatagccagcattgatttgtacgtcaatgacctcgcgaatgcgacttgataggacacttgcaggaagatagaataaagaagagattggcaagataaaccagagcattcggattgtcatgtttgaattttcccttgcgtgatctgctaatagcgtcgcgtcagtgttgatatgccagattgcaccaataatcccatatctgcgcgagatgtaaccgggaacctaagattgaagatcggtcacatcagagatatacatacatagtcattatctcacagacaagagttgacgtaggagataagggtcgattgtccatttacagcatagcaaattaacgccctagatccgcattggaggatcccccggagatcgatatgaagtaagactctggggttgaaatctggagatagcagagtcacagcatggcggtgtacaacataggtgatagatccaatgataacgcatcattgtgtcaggaaggggccttatctccctctgcacgttcgaattttctttggagatacctaggattctccctgttggttgcgatatcagtgagcgcatttttggcccccttaggtagcgtcacgtcttatcgagacgggcttggtagataaccacacggcatggcgtcaatgttcttgggttgttgagtacaacgtatatatagtgcattgtccctcggggtttccttttgacttcggcttcacttcggtgccaactcggccaactcggccaaattcaaccaaattcaaccaactcggtcacctcggtcaactcggtcggtcaactcgactatgtcaactcggtcaaatgactatgtcaaaccatcccatgtccgttcactcaaaaaggaacccatgtttagtctccttgtgtctccacgcttttggcctctaggtaaacgcttctatatggaatcagtcaaatgcctcaaccttcctaaagattttctcgcgtaaccgcaagaaccgcacagaaaaaaaaaaaaaacaccgatgtgggagaagaccgccaaagtacagagtcagattggcgtcgcgggctgagtgtgcaggacgccacggcccacctccccagtgcctcgagggcaataattgcccaatgctttcccccgcgacatacatctccgggttggtccgggtgcctgagacatgactgtgctttcccccactcacatccccgatccaaaatggatttgacaatatgattagaaacatgtatgacctgaaggtcaggtactttatgctaacaagaagagataaggtccaaagttccaccgatctgcattccctcaaagatgaccatggttaattacattctaattacattcctatcagaaccttcttatctcggattccccgacttgaggtggatcgtggggccaaaaaaaaaagagtaggactccacggcatattggagctgattactctgaaggtgccattggatgggaaaacatcgtcttgtttaggcctcgcgtgcctccgtatcccgatccgggttcccgtctccacatgatttgagtcgaccaggctcccggggacgtttgatatcaaattgacacggaattctgagatcgactcttgaacccacgaggatggccggagttgtaccataaacccgacttgttagtgccgcggcggtggcaaactcatggaaagagagggaagaaaagcagggatattaaccggtacggaggtccgcctcaagatcccccgtgaaggcgggaaacagaaacgaagaacgttgatttgcgaagttgtcggttgccttcttggtactccgtactttacctcggatgggggcgaacgtcggggaaattccgtgacaggccgtcctgtatatcttctccgtacacgggtggtaccgttctcgggtaatatagggatatctttctgagcctctcggtgagtctcgacatccgtaggtgggattgattgcttctatattctatttgatatggcctattatggattatgtgcgagatatgacaaaatcagttggaagctgtgaaaagcagtccgaattcgcttcttattaccaagagaaaaacgaacaagacttgtagaacgtgccttatcttttgagggcccatccgttactccgtttactattccgccccgctgcgctaagagcatggactataaacctcgatattaaaacatctgatcgtgcttttgttcctgcggtttcttcatgggtggcccgagagctacttcgtttgtctccaaactgtcctgtagtctacaatatcccgtagaacaagagacggagagatcgagagcgcatgcgtttgttcgctttcatcccacgagacctctttgactggaccgggtggtgtactccaccattaacgaacagtacccacttatcctgcatctggactcactccggggccgctaaggaacatgatgttttgggagtgccatatttctcctcaagcttgtccgattccaactagccataggaattgatagtacctgcgtttggaccggtcccgactcacaggagcgggcaaggtacattagtttcaattttagtacggagcttgcgaccactcgggccgatgattattcaagatgccggtcacatctatagttaaacttggtcaacaatacggagtacccatgtcagaaggtatgccgagtatgcagagaaagaaacgatgcccttctagatcccgaagtactccatatctccatacttgattgggggaaaggtctcaatcggtcttgtacgtcgcagtatatgcaggcggaaaaaagaaagaaaaaaaagtaatcggctttgaagaagacgggagtggcacatccaaatcatggcaatcgagcgaagcgccgtaaatcgggcatttccccgtgacaacagtaatactggtatgtcaaattacatatagattacatagattacaagttacttcttgttcagcgtcactctaggccctcttttgacatcatattcttcttcttttcctcttttcttgactttatttctgttcagttttatttcaatatcttcaatcctgaagtacgtctgattctaactcatacctggttattgtcgttgcgtggtcggcagtaaaaccaactgccctccgtttccccatcttcccacacgtttcccttctctcctccctctccatctttcatctttcacctctctccattctccgtcttcccttcggtcattcttgggaggattttctcttcccatcaaaagatagatcttctcggggcatgagcgtctggagggtctagccccccctccacgactcattaggaaaatcccaagtggcgttgaggctgggtggtggtttccagatccatcgtgcgttcctctcatcccagtcgtcagtttaattacctattatcatatattattatcataagatccgtcccgtgctaataggcattttacgttgacagaccctggtcgttggctgaatcctgccaatcgtctctcgcttggctgcattcgatcatcaacttccggcaagggtctcgtttacggcgggtacggaggaatttcaatccaacccactttttttttgccgttcatcccctccccccgcggtcgcctctatttgaataacctctttcctctcattgaaaccctacccatcggagattatggacgggatacatcacggagggcacgggagagcccggccttcccaccctatggccttccccgacttcgacgcggattcccatatgatgtccgacgacttctctttcgatactcccttcagtccctccggttcctccaatgccaatgataccgtcctcggcaactccatctttccggaatggacgaacggtgcgtcgcgtggcgacagccctgacgagatgcaaaggaaagatccgctgggcgctcagatctggaaactctacaccaggacaaagtctcagttgcccaaccaagagcgcatggagaatctgacatggcgaatgatggccatgaatcttaagcggaaggaacgggaacagcaggctcggtaagaaacactcttatgaatgctaaagcacatggctgatttactgatgtccgaatagtgcctcggaaactttaagcccgacaccgagcggcatcgcgcagatgcgcttgtccgaccaaccatcgcccgctggtggcgatctagcacacgataccacttcggatccaatgaatctagatgacttcatcgttccctttgattctcccgccgaacattcctcgcatcctattgatcgacacttcacagcaacacccactggatcaattcctattaaatcgcgcaaggaccatgcgatgatggattcgtcgaccgctgcctcattccctcatccaccccaggatcagcgaacaaattccgagtttggatacgtcgcccgtcgggtccgcaaaacgagcgtcgacgaccggcagttctttgccggtttgtctgttccgacgcgcaagcgccctgccgaggcctcgcctcaggttcccccggtatcaaacgccatgatggcacagcactcggaactgtcttctgcactgccagactactcgctcgatcatccaccttctgcctatgctctttccggcaatggcacggtgggtccgcgcagacctcaacaccatcacacgcactctaacattccctacgggttggatacgtatggcattagcgaagatcacgggctcaattcggccggctcataccagcaaaatttccatttttcgccgtcagattctccaatgactgcaggaaatcctttctcgagtctatatgcccagacgccgctcgcctcgtcgcttaactcaaccgagttcttctcgcccccgccttctggctatcagtctactgtgtcaaccccgcaaccgatttatgaaggggagcaatcgatattcttttctgatgcgccctccgctgaatcacacacccagcgccgcattcctaattatatccagcagcgccagtcgaacctgtctgcatcgctgcagccacgttatatgtacaacatgtccaacggcgaatctcactcagggagtgcagttacagggccaccaaccacccacgtgtctggattttcggtgccaccaccgcagcatatcaacccatcacaggtgcttggccatggcgaattctctacaacagcgccttccagtagcatgtttactttcggtggagactcagacaacgaagatgacgatggcaactttggtgaaggtggaggcatgactatgccaaatgactttgcctctctggatgagtctggtgatatgagcgccggtcttcattgggacgggggtttccccggatcaatacactcgctaccaggcttcaatgctcagcaccgtaagcacgttacaataggatccacggacatgatagatggcccacctgaatggaaccagggaggcactcttggtcgtgcgcacggatccgctgcttcggtcagcgaagtccgtaaccaaaaccaggatcctcgtcgctacggaaaggttccccgcacagcatcgacgcccaatgctgctgcactactccgtcagagcttgaatggttcagccagtgggcctccaacaaaccatccttcgccaagcacccctccagagtctggtcttagcagtgcggtgccgtcccggccaggtagccctggtgggtcgaaaaacggtgacccgaacgcgggaccgaccacctgcaccaactgtttcacccagaccacccctctatggagacgtaatccagagggccaacctctgtgcaatgcatgtggcctgttcctgaaactccatggcgttgtccgaccactttcgctcaagactgatgttatcaagaagcggaaccgtagcagcgctagcacacttgctgtcggcacttctcggtcatctaagaagtcttcccgcaaaaactccatccagcatgccccatccacatcgatttcatcccgcatgaacacttctgagtcgccaccctcgatgaatggatctagctcgttgggtaaaaccggtgttgtcccaattgccgctgctccacccaagtccggtcccccggctggcgttgctcaagctcgtgctggtgtgcaagtggcacccaggcggcagcgcagactcgaaaaagcaccaactggatccgatccagatctagaggacagccctaagtcggccgctcctccgagccgatccaaagtcgtaccattagctccggcgatggcaccacccgctgccgcaaacccagcgaatcacagtatcgcgggtgggcagggtgcgagtcaggaatgggagtggttgacaatgagtctatagttggcttctaccacatggtccttttcttttgctgagttttgccgaggtgtgaccggttaatcacctctataatttcacgtattacacgacttatgtccccggcggtcgtggctcctttattactcccatgttttcccagattattacatgtcacgtgtccctttttttttgactttttgactttttgttgatttgattgatacaaccgcgtctgtccgggacccgagctgcttattatgtcctcattcttatttttgttttcttgtttcctttgttgtctcgcagctcggaaccgggcagaagtgcgcatctctctctgcgtttgttttttttttttttttttctttttttctgttattattctactcatctattcttggatttcttgcgctgctgagcaggctttgattaatggattctgttatccttgcgtgattacttctagacctggacttcaatatgaccatgattttctccaattcgcccgctctccacgttgattgagcttaccacctctagatgtaattgagccctaaactattttctttccatcactaactgcaggctgagcgaagaatgacatgacagctaacttcagcccggacattaatccggggaaacaatttacgtcatctcgacgaatagttgggctgtactacttcttcgagcttcctcaagataagttacttttataccatacaaggccgcagtgtattttatccagcaatcaaactaacaccaagatagctggaaaggtaggatggaacttcttttaattaacatccaacacattgacatggtgaagctgattctttccaacagggcaacatgtctaacacggacggtgagtggctgtctcgtggatttccttagatatgcagaaccctattcacacataatagaagcctcggaaccattcacaaccaagaccaataccacagatagggtcaccggccgcgtccatgagtctgccagtcatgcacgcgagaagatagctgaacagctccaacccggtgcgtatttcgagcggcgatagcgcgctggctttgttgttttacgggtacggcgaatgacgtcggatctggagtcgctctacgtgttctttcttgatgccggctagattactgattgagttctgcaggagatacgaaggcgacgtctcgtcgctcttcagatacacccgataatatctggcaatttggacagggtggtccgagagaagagcgagattatgggctagagaggaacaagtctatactgcagtccgcgcaggagacggtggccaaggcccttggaggagggtctcgtggttagttgctggtgatggcatttgatattttggtcttgctgatgaaattcccaaggtgcaagctaaatgcctctagcaattccttcattccttctcctatcctttgatttcaagaaattattcatcaagcttaggtgattgcccgctattcatcatactaagagtaaactgctttcagccgtgccaactttcctggcaaatatgcgtattgacttttatggcgggtttggattagtagttagatatacttggaaatttcaatatcctctctctttaattggctcccagcctttgtcctctctatccagttttcaacaccagtaacagcaccaaaaagtgagttcttctgctccaataagaacgacaaaacttcagctagactgaaaaattggtctggcaccatggaagcaaagttgtcggcaagctgggaatgcactctcttgtctgcgcggccaggccgaatgagtgctcatccagatgctcgatatgattggtcgtcataacgagcacctgaccttcttgagacgacacaccgtcaagaacattctagcacaagtcaacagagccgataaatatggaagttatccagaagaatgaagcattcagaaggattgatggcaaaatgaaatttctaatgtccaagtttttgttcggcaagatggcatattatattccggaaaatggacgaatcgattaaattcgccaaagacgttagacgatctctaggaaatcaagcaactgcaagttagtacccgaattcgtccacgggctatgggtagaaagcccgattatatatcgagttgagagctagatgcccgatttcccggaacattgcccaggtgtacggcaggttttcccgttcgggaaaattcatgcctcaggcaataactgatatgataagtcacgtgtgataatcagagcaaaaaaagatcacctacagccatccatcttcaatcaattgacattgcgcagccatgggtgccagctctaaaagaaagaaggataagcaaaaggactttcaggttaggattgtgaatctccgtttctcttgttcaacctactaacttctgcagaaacctaaactgaaggttggaaaaactaaagcgaagcccgacaactacactgataccagtttcaaatcgaagggtatgtgtatctttttggctgcttagtatgtggttatgctcacgattactagctattgtcctcacgcaacaatctctccaccttgctgccccaactgcaaatgccgtattcacgcataacttatctctcctcaacgccaagtccgacagccaacgacgggagtcgctcgcttatctgactacgacgatatcatctcggccagtaaactcgcctctcccacaaccagtcagcgttattctaccatctctgctgccgctcatcctcgatggaagcaccagtgtacggactcagctcctcaagctcttgcggactctcccgccgggcgatgtcgaagaccatgtggcgcaactccttccctacgttcgtgcaggaatgacccatcttgcagcggacatccgtagttctgctgtggagatactatcatggatggtcgaggcagcgggagaatcaacagtttcctgcgcgggaggatggatcaaaacactcaactgcttcttgtctgtgttgggctggcacaccgaagagtcatcgcagtggtcttcaagccgggcttcatttgggaagtctggcagccagggcaagcccatggtcaaaacgcttgggactctggcaaagttcttagatgcggggatcggaaacccttctatcagcggtgtcgatagtgagatgtcgggtgatgatgagagtcccgactggccgtttccactttgtcagaccgcccaacacatgatctcagactcatctaccccattcgcttatctgaatctgtttgggaagccgcgtgatgaggaaggagaaatgtacgaaacccgtgaggataggtatcgcgttttctcgactcgtttccagtcagcaatcgagcgtggaatcaagagcgccagagaggaaggcggcgaattgggccgtgcatcatccggtgtgactaaggtgttaaaagaagcgattgcgtacggacccggcccatgaatttttcagccaaggtttacgagcaaaaccaaatccatccgatataatggtaccgtgacctaggctgggcctagagctttttgcgggctttacctataagccaccagtggaacacgcatccagttcaagatttctcggatatcatactatggtgtctgttttaggcagatggcctcgccctgcgaaaaccgagaccggcgctgaatagacccatcggtaagcccttcggccaggggcccttgcagcaggtaaaagcaagatatatacaataccaaggctccaagccaaagccttaactggaacctcatatatcttctcacggaacattgactttagtcattcatccccatagccttggagagcgagaaaatcacaagcaaaataatctaatatcatctatagaaaattcgattgttagaaagagaaaaccgtatttttatttcttcgtaaacgatcagaaggcaaacgacaaaagtgcggagtcctattattagataggctctgaaatgctgtatattgtacatgtacatgtactccgcacggagtatagaatatgtataccatttccaagtcaattcccgatcgatgcccaaggactaaaactatcctgtttgctgtgatgtgtgtgttagactctgtctcttattcgcttatactggtttctttacggtcttggaagtggatatcctttaacatattattggagacaaagaggggaagacttgacatgtcttgtagcgtgggtctggcacttctgcatttttatttttatttttttgtttttgtttttgtttttgttttgggaattcaggaccacgaaattgagtactacagatgtgaagaagagcgttttttcggagattaagtgcaggaaatggttatggtgtacaaagtactccgtactatctacaatatgtaggtaatgtgtgagacgtcaaggcaaggggttcacttcatgattcattcttccagaatcttatttcttttcgttgaatgggtctcacatccaagtttctcattctcacttataatgccggtatagattaatagttatgtagtacggagtagtgttcccacattgctacatattattgacatatcgacatattgtatattgtatattattattcaatctttgaagtcattcgcattgatcaatatgttatgttattgaccccctatgtattttcaatagtctaagaattgagtgtgagctatctcaccctctctcatttccccgatttacatgtacttccccccccccaaaagatcggccatgatcgactgtctataccctcggatctgcacaggtccgatctaaattcttgctttactcgggaagatcatgctaagtgcttggcttgaaaggtttgttctgttggatctgatacctcacatccggcggggagcccgggttacggagtacaggccggcctgacgttttcttttctcaccccccttgcattctctaaggggggcaggaaggagaaaagccaattagtgaagagccgttcgattgacgattggtctatggttggccagcattgtccttgccacaataaacacaatgaggaaaagggaccgaatccccgacggcaacatgcagctgcattggcacgcccgagtctgccatacaagcgttgtgtcatattacctgctggatcccaaactatacatcgcgagtgccacagcatgtttgatggctagagttgcctagtctgaaaagttctccacaggaccttgctcggacgaatccctttggaaaaactcattttcatcatctcttcggattcgtactaccgttttagcctcaaccaccctgtatatctgcgcctttccaggttccgggaggggcttcctgggactactcctgtgttcgttttagttcaaggatcccctccaagtaaggatgcgacagctcacctgagatcctattaaactctctccatttccgcctcgcagtcccaagttttgttcgctcgttctgattctcccatacagaacgccacgctcgccaactcttgtcgactttgtacatatcgacaccccctgtatatagtggtgtcaacttgtgtcgacgtatcatattcatattcctcgcgcgtctatatagcccctggcccctattgtgttggccctcttgagcaggtgagaatgcctcgctcccgagccagtgcctcggtttatccttctaacttagaagtatagcactgtctattgctttaaccggtaagccctgggttttcatgtcgacacccgggaactgccggattgcaaagcaagccagtaattgatgcttcgtctccctatgcatcagtttgattcaccgcatgactgtgccgttgcaccaagcccaatcgttcggacttatcgacctgatcccccctcgaaacgcaggatccccaacatgacgtccacaaagactgggccagcacctaagcctctagtcattcctaggcctcaaggtggtagtgctccacgacctgaagcccgatcagcaggcacggctgaaagagccggtagaaatgaaagcctagtggacatggttcgattcttccaggctcaaaatataccctcccagcccccggctccatcccaacctcaaccccgctctcgcgctccttctgaacctcaaccctccagtccttccgatacaaccactgcactcccggttcctgtttcgcctaaagaatcaaagccagagtcaaagctagatccaaagcaggacctgaaaccatttcatcgtcgccttttgcagtttgcccagcgccaaaagaaggaatcatcacccaggtcaaagcaagaagaacaagagcgtcaaatcgaagcactgagaagggaaggatatcttatgccagcggctttaccaaaggagtcaaagggacaaaaggaagcaaagcgatcaaaagaaagcctgtcgctatctatctctcgatctctttccaaatcaaagaaggacgtggagaacattggacagccatggctgcaagccaaagtcgatggcaacaggcgccctactgaaaccagacgtagcttgggctctctggatcttgatgatttcggctcaatggtcgatgtcgcagtctcactcgcttccgatttcgacgattccatgccgccgccatatcagcccaccgatcacccttcctcccaatcctcatcggctactccaatgtcaagttctacagcagaccctggtcctcacaatatcatccggccagcttcttcgttagcctctaccagtcattccaataggaacgcgtcaattgatgagcaaatccaacggtcatctagctctgcagagttgagtatccgtgccgaccctgtctcacgaggcacgatcaatacatccgtgggtgtgaatgtgaccgagccacagcctaaaccgtccattgatagccaaaagcgaactcaatcagaacaatcttctgttcgaaatgtaacacccctgtcgcctaccctgaagctttttcccgatattgcacctcgcaagtctagcaggggcgcatggagaaattcatcaattcctcggtaccaaacgatcgaaaataccacagcatccagctcacgaactccatcttctgacagcgcccccgatgttccagacgagcgaaaaaagtcttcagatggttttatagatgctccagtcagcgaggcagaactaaagtgctctggtgcccttgtaccttatgcgacctcttctgcagcggcactatctatagaaaaagccccaaaggattctgcctcccaagatgagactaaaactcggccactctcgttgtctctgggcacactgaaggcatttcctctcccggcacctacaaagcccctgccattactgcccaaaaccaaatgctctccaagcactccggactccaacactcgctcgaaagcttcaaatattcgagcgattgagtcgcagccactgtctaccaatttgtattctccttcggcaacactaatcgaagaccaggagctcaaatccgctattgatagtccatgtgcccttgactcggaccctacaaactctcttggcagcgtcgatgccggggagtcaatggccgatgatgaggacagcttgtttaccacttcgctttcggaacactaccagccaaccccggaacattgcattccgagaggacgtgtttcaagtgtgcgcatccctaggatgcaagaacttcccgaaagtccctcgagtgaatgtggtgcaaaggtctcagaaggacagcctctggccgactctcctgtcctaggacacccaacccctacaaaatctaatggcaaacgtgctgttttgaaggggcttcatgtcaattcccaagccagtcgaaaaaatcttccattcggtctaccatcaccgccacccacttcatcactcccatcagctccacctactcagcacccacctcctccgccttctgagcaaaaggttgaccaacgcaactacactgcgcctaatgtggctgttctgccgtcaatgaggaagatggaggtgcatccttcatcggggccctaccgaggctcgaccttatcccggagcgacagctcagggagtagccttcgacatgagaggttccccgaaacatatcaacaaagtcgccccgaatctcgcaccgaatccccgcttccatcatcagacgatgaggtttttggtccagggatagacggcaaatgctcgcgccggaaagccgacaaataccaacgcatccaaccaacacgccgaggatatgagacaatggatccacgacagatgtcctcacgcagtcgccttcgtgactccaatcctgcgcgccctatgacaccccaaagccgcagcacccatggtcttgggaagacttcgtctcctcagtcacaatattcgcaatcaacccacagatcgagggagtctcaaagcagtcaccacacccgcgctgctcctcaagtggatcactacctcgaggaccgggttgcgaatctggaacgccagaaccatattttacaggccgctcttatggcggcgctcaacgctggagtcaagaaccctctcgagggtctcaatctagacgcgcacatgtcatcaggctccgcacacgcacaccaatatcccggccgccatacatcacggcctgacagctgggtcagttcttcccgcagcagtgagtacagcgggtttgagacttctagctcctaccgagatggccggccaaacgtcaaacagctggacaacatgatcgaagacatcgagtctggctggctgtcggacaagtctagtctcagtggagctcgaattgcccgcaaacgatagataatgatctctttttttgctttccttatatttcttttttacatctttactgcttctgacaccacggtgtcgctcatttattggcttgtgatgatctttttggcttccacttctatatatccaggccctctctatctttgcctatatttttcatgataccattttgttttgctattgatctttttgcattcctattattactgaatgacctatatacttaggccgagttgacatagtacaccgtataaaacgcgcacagaattgaaactacctagaaggtcttgaataatagaggagctattaagtcaaatcctgtcgttttatcagtacccaaagagcttagaggtctttaccggaggattcgatctattcattggatgttttgtgcccatcctaatgcttagtcatttgttttggagaccaagtaactaactaactaacttcttgaactccaagtgcttcaatcattctggccgaagaaaagcacgtggcgaaaacagcaattgcaaagatatgaggtgctcagtgctcgtctaactcacccccgaccataaccctcacaccgtataccaacactcttcacattcccccgcggaaccccccaaacatggcgaactcaggacaagtaaatgcaacctctcctccaaatggacccaaatattctaacaagcctccaaagcgcacacagcaggtcccccagcatgtttccgcgctgctctcgcacctcacctcgcgccccggcgtgcaatccaccttgattctctcccgaaaagacggatccatcatccaaagcacaggacagttagcacaaatgaccgaagagaacggaggttctcgaaccgcacacatcccctcagccacaaccgatccgactgccctctccgccgctcaacccacagaaccatcccctacctcacccgccgtgtcacagccctaccaaccctcacaagccgagacactagctgcccacatcttcgcgtttgtctccagtgccgaggcactcggtgtgtcactatcgcggcccactcccactgtgcagcgacccagcgacagccattgggatgataactacgactacgggaacgaggcgggcacagcacgcgaggaagaccgggacggcgatgatctcgatcgggatgaggatggagaagtgaagctgctgagaatgcgcacgaagaaacatgagattgtggtcgtgccggatcggaagtacctgctgtgtgtggtacatgatgcctcccccggcggaggacctggggcatcgggctcgcgctcccggtagtggaagtcttgttctttattgcgaatatggctgctcgagtcttccggtttctctttctcgttgtgtttttatgggtcttgtttggtggctttggatttcatacatatacccgatggagacaaaatcttcgcatttaattcaagttttccataccatggctatgtgtaggactgctatacacgggttgtcaagatggaggtgtctattgataaggaacactttgttctattgcttgatggagggatgatatacggcgggcaatgtgggtagatgtttgagcaacctccgttagctccactgtttacccctcccaagctgacaatgatcaatggacagacatccttcgtatcttgcaattcccacgcctaatagtgcatatatcacctagctataacaatcgagtctgacctctgctctcgatatttcagcagctcgctctggcttccctacactgcaataacaacgctgatgagatggccctccgttcttataaacgagacttttgctgattgttaaacgacaggcggaaatcaggttctcgatactctcgttaatctgatcgacactattgtagattttaatctactaacgtggccatagcatccattcttacctgctaagcacaaatgtctggctcagagtcagctataatgtctcccagacttcgactgatacgtacgaaaatgcatgcaaagtagctgctgagctcactaacgccgcgcctgaggaggtatctgcactataatcaatagcgtttacttcccaagaagtataagaactgcccaacttcgggggtgaatgtatggaatcagatcagcattggtatatcaaccactcagctattgtgcaatctctccacggcgattaaattccaatctggcaatgaactagtcctatacaaacttaacaacaaagccaatacctccccgtgggtccatatagcagagaggttgggcttgaccgtaaagtggtgggcgccgaccaaagaattcaatgtgcgatccagctgagtgagggtccctgctctccgataagaccagactcgcggcatgccttcatgcttccaatatcactggcactatcagtaccatccgaaagatcgcagaggttgctcatgttcatcccgcgtgagtgaccataaaacatattgggttctaagcactgatgtgtgtggatggagtggccctggcgccgcatcgtcgggtcgacgtgaaggcgttgagcgtgggtttctacgtaaattgcaacccaagccttgggtgaccggttcattgctgatcctccccccacaaggcattatcctggtacaaggtgtatggaccacactggcgcaactatatacctcatcacgcgttcacgaccagatctagtcactggggcatttcttcaagcccgcatataccctaggcatgaagctgaatctcatatcggctaattatgagcttacacagagtatcccccaggttgtggagtacttttgactccgaccctagcacgacctgggccccgatggccaagcacgaggagcgcaacagattatactggaattcctagcttctaatagccggattcccgttatcggtgaaccttcagccagcaaggagctccgtatgccggttgttagtttcgttgtgcagggagtggacagtccgcgccccgtggatgaagttgagcgtcgatcggccttttggttccgcaatggtcatatgtacagctacagctacagccaccggctactggccgacgtgtgcagattggacaatgtaaaggacggggtggtgccggtcagcatcctgcactataacaccggtgagtggatatcttgataggatttattcgatattaacgaggatagaggccgaagtatgggggctggtgtgttgcgggaggtgcttgttctatactacttgtagatagcttactccgtacatgcgatgtacatcatacctgagctttccggatacattttacatgctatggagatttttcttcgaatttgcctttttttctcccacatcactacagaccgcatattttgccacttagctgccctgtagtggtgatctctatattgtagatagttaaaccttcgagaaacccacacaccttgaagcctaaccgtgaaatatctgctctttgttttcagcctaagttcccaccgtgaggtcatctgagttccaactcccgaggttccccagctccatctggaaggctgcaggcaaccccaaccaatgccgatcgcagtgtcagccaatcagcatagagataatcgtggaataatgggaattatagtggatcacagcctaacagccgcgcgtggattggcccaagtgcgaagacagcgtggcaagcggcttttatgactcagtggaacttcgacagagccttcagaatggatggattccagctgtggttgagtattatgatgaacatctcatgaaccttccccttgatttgttaatatggggtcttttttttcttaaaataagatccatcacgctatgagtggctacacagacataaggtgccactgtatagtcaaaacattccaggtactctgtcatgtttagaatatcaagattagcatgataatagatatagaacatgagatagaagatattagactatctaatagcatataagaagaaaagtgacagcagcgtgagtcaccgtcgtaccactccagggcttctcctgccctcctatctcggagtctcttcgccgcatccgggttttcccccctctcaccatctctagagaatgttcttcatctcctgattcaagggagaatatcatcaagaagtggaatatttgactatattctatattctgtatacagtcgtggtccctgcgcctcccggcatcttcctaacccgccacccacttcttctcgccacagtgtgactctcttttccccttcctttttgcccccccccgaatctttcttagtcaacttaaaaacagattttgagaagagtcataggtaaggtcgttccatagtgaaatgtcttctcttatttctctgactcctctaacaacatcttgccttccatcagcctcacctcccccgactctcgcctcctcctctgcctagccgcttcaacgactgccttgtacagacaagccaccagcgtggttctgcctgtccacggtccgttgggtgccttgatataaacccttttctatcacacgacttgtttcaaaatgtaccttattgattcatccgttccgatcgcctgtgttgctgttaccgacctccgcatcgtcaccgtctccggctccatctaatacactcggacaaaagagtcatactgccacgtgcccctgctttggttcttatatcagaagcacttggttgatcggatcgtgaatacgttttccttttcttgtcttcatagttgattgtttcctctttggcctctttttaaccgctacacccggcggttccgcttatttttctacgtctggttatcagcctggctctctacttttaaaggtctgccgtcgccttcgtcgcaaagacggcttctgtctcctcggctctcgttcccggtttcctgcttaacggtatcttgacactacggttccaaaaaatcggaccatctcgcttttatccggctgtcttcatttgaacttgtgttcacacaaacgcgctatatgaactccacagtactttcggatatgtcagggatggacgtcttggggttgaacctctcaaacccaagctctcaattgacagcgtctcaccacgctcacccctatgcctcatcgatctcttcctccgcttcctcctcctcctcctctgtattctccctcgattgcgtttcctcgcagagttcgatatcatcgacatctaccaacccggttgacgtgatttgggagaatgagagtaatagccagttggcgggaagaaatccgaacggggcatgcccccgggcttttgccaaggggcctgcttctaaggtggacggtgtagtgccatccgagctgcgaacgcaccctcggcgcactaacagttattcttctagcgctcccagtgcgcgccctccgccatgtctgttacggcagtcggaacggaaggtgaacttcgtcgacaacctcgtcggtaagtcttgaaaaagagaatcctcaagtacgtcctcgtacacccggctaaataatattcccgcttctttaagacaccgcgtcacagatcgttgagaccatctggcccctttctgccgcggcatcccgcagtgacgccgcgaccggatccaaaggggttcttcccctccgcacttttatccaggaaactctccgccgctcgcgtactagctacagtaccttgcaggtggccttgtactatttgatcaaaataaagcctcacgtgcccacgcatgacttcaccaaggagcagcctcgggatcagtcgcctttgcgggcgatgcagtgtggacgacggatgttcctggcagcgctgattctcgcttcgaagtatttgcaggatcgcaactactccgctcgtgcctggagcaagatttctggactcaacactctcgagattaaccagaacgagcttatgttcctcaaggctgtcggatggcgcctacacatcgatgaagcaatgtttcagcgctggactgatttggtcttgaagctgacccctggtgccggtggacccccggttgctaaaggtcagtgctggcagactgtcctacccagactcacacctgaactggactatgtagagtcagagccattgagcccggttgcggcgattagtgggatggatcttggtctgtcggaatactcacctcgcagtctgccaatcaatgaatccgtgcgctctttgtcgcgcgaacaaaccccgacttacgcccggagtcttccgcgaacattggagcccactccgcgcatggattttgccaacttggctttgcctagtattccccggcctatgatgcttcctacgccacagatgaccccgcaatctcaagtgtcctccactcctgctgcgagtgtgggtgcttataatgcccgcccatccatttgtacggctatgtctcaggcgcagaatgcgtgcatggcgcgatcaacactcgatcagcgcccgcccctgtcattctgccctcggactcaatcgtacgatggctatccggctgcggctcgtcggtcgtctttggctcgctcgacatcttcggtctcatcacctgactcgatggtttcggacgtctctaccctgtcatcccgctcttcgcggtcgtcatcagtttcgtccaatgcctccggtgcttctggctcggcgccacctcgtctggccgtcaaggccacattgcgctgcactagtaattcccttaaggagtcccgcaagactctggccattgcctctcctattgacgagagttgtttggttggcgtctacagctctcctggatatcccagttccatgggttcttccgtcccagacctgtctactttttccctggattccagcctgagtgaagctgctcagagtctctgcgagctttccggcgccacacccgaacggcgtcagtgccgaaaacgcggacgtactggatccgacgatctcttgcttcagaaccatgtgcgccacctaatcaatctcggtgtatctggagaccactgcgggttgcctgacggacagttcccatgttcgttcatgacacaacatgggtcttccgctgtccccgcgcagataggcccagtctctggaccagcaggcatgaaacgtgcctgctgtggtagcgaagcacgcaagatcgcgttgaacccgagtctccgtgttgcggagtacctgaattgacttgcgatttattagcggatttccttttttttcttatttcctttgtgcgaggcaaaaaaagaaaaagtccgtcgttttgtttttgtttttttccccctacgacgacctgaccccgttgtacatacccctattctcgggtactcggtcgtacgtactgggacttgggcgtttgattcccacgaagtgtaggatgtggtgatgactggcgtgtcttctacttgcatcgtgcatctgctctttcactttttcccctttcttttatctacttttgcggttgcgaacggagtggtcggcatgggacggttatggtctttatttaccctggttactttgggaggaagcgggcgtctgccctggttacacctgtatcaacttatctatctaaggggtggtatatttgccatcccagagggcgagaactcctcggataggatagtcaatccaaatacagctcaacagcgataccggcccctctcgtatcactaagctccctggcaaccttagaactgcccagatgtgcacatgacagtctgactgtgcaacctcggaacggcctcggggaattccatggttttattgtgagtcatcaaggcgtcaatggacctgtgtggggctgtgaaccttgggtgtggctgtggggtattcccggagggggatattagccggtctcgatgttgtacatggaagtatctagtggagctcatgcatgccacatattgttcacagctcggctcttacaaggagttatgtacttttatttcgatcctggggtgcttgagcatatgcagacaaaaatcccatgtctatccgcaactgattataatagggcgggactaacaaggtctcctgagaaacgagtgcaaatgcttagaagtctggtgtgacaatccttggcttctatcgggtggactcgctgtttacgatggcgagaaaagaaacccatctctccgtatgacatacatactacggagtagttgacgctaacagaaaattaaggatatcgatgccagagcctatctagatgtggaaacatgtatactagtagataaactttgtatcctatattatcttaaaccgcttgttattcttcacgagattgggcatcgaaatggatctaacgaggaagatatggagtctgatttcgggaagaggacatgaatcttggccccgaaggcaaagactatgacgaacaatgggggttagataccttcaatttcgtaaagccagagtgacgacctatcaacgcggttaatcaatcctcaccgcactctgaggatggagttaagcagatgaacttgttgaagttggagagcttactagatagttagtacactacctaaatacatgtagttgctgggctctcttgagttgcgactggatgacagaagctttgtacggcaatttcgtaactagttgatattgatagctaatcatccaccgatgtcgtattaggcaaaaatagccagctataccttggcctggagactattgaagagaaaaatccgaggtggcaccactggcggttagagaatgccgtagcaggtgactcgatcagataagattgctatcagctgatgcccccgcacttacccgtttcgttctgctctcttcttccttgcacccttgaatatataagagctcctttgatgccaacttgtctatctcattagccgtcataatggtctctcatttggcctccatcctcactggcgctcttgcgctgcttttacccctcacggctcacggctttgttgtcccacttccagacaatctccaagcctttctcggacgactagatacttcgacacccagcccgaacattaaccatattgaagatgaaagtgccttgaatcgaccgtcatggttcacttcgactttgatggctcgtcggctgcttgcgctgtcaccctctggcgtcatctccaccaacttcccagagtccctcccaccctccgcacatgccccatcagatgttgccggtctgtctatcggactacgcgagtacattgccgattgtgatggatccctgccatcggatttctctcacgatgatcgcggtgatccaacaattcttggccttcgcattggaaccacttttaagaacattgcagcgggatctaatctcagtctccagttagactggtgggatcatctaaatgaggccggtccagtctaccctggtcttcctctaagcccggctgctcttccccgtgtcaccctcttcggttacttggagaaccttccatccccgcttcccgatgacgcagctgcggccctcgagaagtgtttcctcgagcctcatcccgatgcgaaggtctggctacctggtgcttcttattcgccacatgcgagtttctgggcccggttggtggtcacccatgcttactggattggtggatttggcgatgtacagcagattgggtggatcaacctcacggagtggcaaggggtccgaccacacggcagtgtagagggcgttggtgatggaagagggtggcaggatgtccggttgccgggtgagaaacagtaaatggagtacctaggtacttgcatgaagattgacgaatgactggggcgcgcagtgacgatcgcattagttctttcgcattagacctgcgcatgcatcatggatcgcaattaagcgtatctctatatctctccacgctaaccagttttacgaggtacttttgagttctctcttctcattcgtcccctagtcttatctacataccgtaggcttatcattcttatcttcatccctgttgtgcacggggcaagtcgggggcaaatctggggaataagaagacgttgagacctgcatcatttttggtctcattgtattacttctatatcattgagctgtttgtcgccttgtgttgtggtgttaggttaattaatatacggatcggggcccgaaccctccttatcttgagaacaaccatctcgccaattgcatcttcgaacatgaaactacgcatctccaggccccatttacgggtctcgcagggtgaatctgcatttgcagcgggaaatgcacggtggacaaaccgtgatctcgacccgattaccagaattggacgcaaatggggtatcctcagtataataggtacggtactcgtgcttatcttttacaaccatcaggctggggctaatagaatatgatatcagcatattgggtctccgatgccttgcatgcagcaacctggcagttcgccagcggtatgattgccgtcggcctcacctaccgtgaagctctgggcatcgtcgccctgtccttcttcatcatgtcgttggtcatcgcagcgaacggtactgtgggcgctatataccatgtcccattccctgtgattgctcgtgctagttggggcttttggggctcatatatcgccattatttcacgagtcatccttgctctcttctggtttgctatccaaaatgtcaacggcggaaatgccgtcagtgtcatgattggagcaatttggccaagcttcttgaatcttccaaatgatattcccgagtcacaaggaatcacgaccggcggtatggtcgggtttgtgatcttctggttgatccagattcccttcctctgcatgcatccaaacaagctgcgctggttatttacaatcaaatctattctggttcccatcgcctggattgctatcttgatatgggcgtttgtcaccgtaaaaggtggtggtgccgtatttgaaaagcaggctccaaccgtctccggctccaagtatagctggctgttcttggccaatatgacctcagtcttgggaaactacgcaacactctccgttaacatggtatggatgctgtcttactaccaactttcacaaaagctaaccgttcccagtctgacttcacccgctactcccgcgtcagtccccgctggcagctgctctatatccctatgctgcctgttatattcactttcttttcctttattggcatcgcttcttcatccgctggccaagttcactataatctctcgtctatcccatgggatccaacagtcctgatcagctattggcccaatcgcgcgtgtcgatttttcggcgcagcgtccttcgcactagcctccctaggagtgaacatctcggccaattctctttcggccgctaacgatttcaccgcactagcaccgcgatatatcaacattcggcgcggtcagcttctttgcgccttgctgtcgtggtgtcttgttccctggaaaattctcgaatcggcaggcaacttccttgattttatgtctgcatatgcgatattccttggtcctattgcttcaatcatgatgtttgactactgggttgtcaaccgccgtcgatatgactgtcttgctctataccaaccccataacccaagatatcgctatgagttctccatcccgggcttctcgggtaagagtatatctggtacaaactggcgtgccgtggtgtcttttattgtgggtgttgcgccatgtcttcccggactgatcaacaccgtgaactctcatattgatgtcggcgtcggtatacatccgttcgagtttgggtggctcttgggctttgttgcgacatctattacctatgtgtctttatcatggctgtttcctgcgcgagagactcagatcgaccgtgctgttttacctgacgagatatacgatagaggcacggtgttcgaaggaatggaagcagatgacccagataggaagtatgtggttcctgatacacaggagaaacacatggatgtggtttaggctgtctggggtttctctgataatcatgtgaattttatattctgtaccaagtggcatgtagatatctttgtgaatataatcaacttcaagaatatgccgaccgcttacctttgtccttaataaagtaggatacttgagcaggataaccattcatttggcccaagatgatataaccactatgttttaatttgatgacactatgcatatgttcccagagtgacagccatttttatagcatcttttcaggttctaaatccggcccttttcccttgctgcaattactaatacagcggcgaatgacacgaacccccattttgcttgacccgatctaggtcgagagggttgcatcgccattttagagattagtccaatacaccatgtcggcctattgaattggggaatggaaaagccaacaagctttccaatccgatggtttccttctcaaatgctataacaccaagatacatgtagagaaatggcattgaaaaaacaccagtccttcggcaatctgtcgtcaattccttggcaatctccagttgaccttccaaggtttattctgccttccggtatcttgtccactctcatgtgatatcacacatcttttaagtggtaatgcccctccagactagcaggtggcagacacgttgctacggtggttcggagcatcttatatcctgtatctagatggaggtaactaggtagatcatatcgtccttgaagataaaggtcataagcggccgataatgtatgccttggaaatattaggatctgaatgtattttcgtagatgccaaagaggtatctacctggccatataccaacgcccccccccccnnnnnnnnnnnnnnnnnnnnnnnnnnnnnnnnnnnnnnnnnnnnnnnnnnnnnnnnnnnnnnnnnnnnnnnnnnnnnnnnnnnnnnnnnnnnnnnnnnnnnnnnnnnnnnnnnnnnnnnnnnnnnnnnnnnnnnnnnnnnnnnnnnnnnnnnnnnnnnnnnnnnnnnnnnnnnnnnnnnnnnnnnnnnnnnnnnnnnnnnnnnnnnnnnnnnnnnnnnnnnnnnnnnnnnnnnnnnnnnnnnnnnnnnnnnnnnnnncccccccccccccccccccggaagcatttgataacatggtgaagtggtgagaaggcccgaatgtgggtaacgttggaaagacgcaggaagatacaaatcaagacgatattcatcattgatattagagtattggttgaactaggtgacaggcatatgacatagcgtcatgcggatgctcacaggtacatcgggattggccttgcggcgcttacttgcgttttggcttgggccggatgaaagggtctgtcgccttctttttgcgcattattggaggtcggggcttgggagcagcttggttgggaacctatattgataagaaatcggtgtcagtaatcaataacaaagtcagacaagaacatgacgcttacatctgctccagatcgcattggtggagcccttgtcgggtcattttcggtcggatacgcctggccatcgcgagaaggcttgatgagaccctaaggagttgtcagcatgtatgaaagctagttgttgaaatagcgagaaaaacttactcctggtgagccattggctagcgggcccttgtaaccattttgagtattggccactaggttgtcgcgagggggaccagaaagacccgggtgaccactgactcttgggacattcgaaccacgggcagccgggccagatagaccgggatgattactacccaatgaaccctttgaaacatggattgggggatgtggctgcccggtacgaggacgttgcgcttgtggtccattagaggaagattcttcacgttttctcttcgcagaattatcaagagtgttgattggcgcggttgaatttgtggctcgaacaacaggaattttggggttgtgtcctcctagttgacgttctcgctgacgctcggtcgatgaatcttgacgttgcttgaggatatattcgtccctctccaggcgagatttctcgatctttgaaagaactttcgtggacgtgcagttgcgggatgagtgcccacattcaccgcattcaacgcatcgttcggcacggcaggaaatcttagtgtggccaggctgaccgcagcggaaacaggttcctcgagcatttgcctttgcttcgtcattgtcgcagttgtaagtaaaatggttggcgcttccacagatcccacacattttcgtcgggtctaagcccttggctcccccagaaggtccatcgggttgtggaattggggatgtaccgtggccagaggcagacactgagacggaggccgacgaaggtcgggaaattggcggtacagggggctcatagtcgggagagcctggagcttctgctgtgtcaaggtcgaccatttcaatctctttgtagccagtgaattgcggcttctccaggattttcacaatatcaccctccgtgtagacatttcgctcccgcgcgttctgaatgagccgactccagaactgaccctgttctagggactgcgagttacccagaacccagagcgatgacttggcacgggtgagaccgacgttcatacggcggatatcagccaagaaaccaatacccttgttggatgctcgcacacaggagaagataatgatttcactttctctaccttggaaagcgtcagtcgtattgaaatcgaccttcttcaaaatgtcttcgccgtatcgttgggtaaattggttcttgagctctcttagttggcccttataaggtgtgatgatgccaatcttgcccgcaaagtcgtattctttgacatctgtgatcaaacgatcatacagttgcatggccacttgtaactccgcgtaattgatcaaggaatgacccctggccgcagatgagtgcatgccctggacatcaaaaaatcggtaaggactgagaagctcgctttgatgccagggacgctggcgaagcttggccatgtccggtccatcctgcaacttgccatcatagaacgtcacactggggaaatgactgatggctgggtgcatacggtactggatatccagcaaatgcacgtctcgagggtgattcttctgcatgcggacgaacaagctctgttcatactggaacttggacgccatttttgacagtacagttggaggcaactgtttgggatcaccgacaagaacacacttcgagcagccgtacttcagcgggataagagcactgagttcaatacactgcgccgcctcatcgatgatgacggtctcaaactcgacattcataccctggaaaatttcatgtccagatccactgagagtagtgcaaatgacatgagcttcgttgatgatttgttcttggatccgccgtttatgcatatcagcattgcgggccagcgtatggttctggtcacgggccttatcaatagacgtgcttaattgggaccgtttctttttcatcaagtgaaattcgcgctccagctcttccggaggaggtaatccctttgctcgtgcctcatcgaggcggccacgaagctctttgaatgacgtatcagtcgtcttatgctcttcatagagcttctgcaagtcgacaccatttcctttgctaggatcctgattcagacgggcattgaccatctcatcaagggtaacatctaacacattggtgttgattgcgtcacttcttcctaaacgaagaacagagaccttttcttgccgaccatgagtcgtcctcacaccatccttcaatcgcatgactaactcgtcgacggcggcattgctaggcgcgcaaaggagaagtttctttgagagggagtttctcgcaacaggggcaccgttgactttgatcacctgtttcccaagcacgtcgcttagaagacttccgacaagcgcgatgattgttttggtttttcccgaaccaggaggaccttggatgagagtaaaagcgtcgttgtcgacagctgacttgatggcttttgcctgagcacgattgatggagtaattatccatgatgggttgcagtcttgcgtccgaataagtgagaagaggtgaaggcttagccaagacaatctcttcacacagatcatagtactgcaacgccattagggcaccatattcacgctccactgggatcaaagaagtgatcttggcaccccatgcctcggttcccggccctaaagaagacaggaacttgttactcccaggattgacccgatatgtgacctccatctttttgttctttcgattgacaccgcatacacgagcgagaacatggggcgcactcgggtcgcttgtgagtttgggcgagctggagaacatgaccaaatcaccttcgcccatgctaaaatccttgggaagaacaccaagcggctgggtgctgaattcgatccacgagtcgacagccaatcgggtcatgactttgacttcgaagggtcggaaagaaccttcgtccttcgcctgttgaaaaccttgccacgcttcaagaattaacaaaggttcgaatgtactctggtaggcatcgggtgtgcggaacgtgtttgagaccagggaataatcagtgcgatccgaggaaggaggaagatcgccggttgcgaaaaagtcccaggagaggattgaacggtgaagagaactcagatctggagccaggcgagcccgcatgtccctgacagaccgatggcgcttgacctttctgatgggttgctgttgaagggattgttttttgctcaattcgtaggccgcgacggcgtcgggtttcttcggtttggcaccaaagagttccttgtctaattcatcttcgctctcagaatcagactcgtcaccagaggaaaccatcatgctatctgcaggggttgtatgatctttacccttgataccaatacctttcaggccagagccttgttcagctgtttgctccccaacaccatatgcggtcgtgttcttcttgagtctggcgagctcaatctgatcacgcttcttcttggcctccctttcccgttcgcgcttctcacggaaagataggacgtgggtggggtcattgttagatcgtagaggaggaactgacttgggaaacatcctcggagggaaaatgtccggacgattcttgagagccgttgaggagtgcattttggtggccttttcagctgcgcgtttggcttgggttgcgaggcgagccttgttgaattcgacagaagaagacagctcaagaagagtttggtcgttcaaagtatcatcatcaaagtcatcgtcactggtgatgcgagaggaggggctggaagcagagggtttggcaaaagcggtgatcgaagactgtttcttgagagcagcagttgaggcagtgacgacaggtttcttatagtaagcctccaatgagcggactaattctgccttctcacgttggttgagtattgttttgattgtgccattgacagccaccccctcaataaagctcaatgcatctggcttcacagtggtcacattcatcccacccaatctgcgtagaagttttgccaccaaccctacgagcgtcgttgccaagaactcatccttcaacctaagccattttaccatagcactcattgtggctgttggggacttgaggaaattttcggatgcagaagtctgccccgggtccgcattccctacagctcccaagaacacaccatattgatcaaaaagaaggtcagcgaactgaatcgtgtcacggcaaaattcgagcatgacagccttatcattcccccgaagatgccatgcctcggtctcatcaaagatcgtggtcagtgccagccacagatactcccaaagcttctgcagcgacacaacctcccggcgatcagcgagattacgagttcgcagcataccggtttgactgtcacataatatctctacgatgtctgtaccagtgtatagcattcttggggcgggtgcaaaagtcttcatgtgagatatccgacggaatgaccaactgagtccgtaaattgtggtcgtgaacgaagattggaggaggtgagaaatggcatctcgtcgagctgactggccactgacggccttgatcaagtcaaccgcagctgtataggtgtcatagtcggcggcaaacagagccgaaataacggcgctactagtatcctggctttggaacaacgtttcaaggtgctcgggtggaaagtccgcgagacgctcgatgattcgacatgagaggttggtgagatggccataaatcatattgaagtgggtcttctccttgttcccttctcctttcgtgggaaacatctccaagccaaccaggggcaagattcctaagagggccgaacttgacagcggcaggttatcccggtggaggtgcttgatcacagcatcccagatgggtgcagagtaggtagatactccatgtgagagcgtaccgtgcttcagaagtgcctcatagtcggtcttcaacgattgacactccaatgccaaagtgttgcgtacaacttccatgcactgcgtgagaatgccattctgccgacttcgctcaacatcaaaggtcggggggctgatgattgcgtcgattgtatcaccaaccactcccattgtctctgccaatacgatccgagttactgtaccccgggaagactcattttctgtgaagcggcgtagtgtttgaaggagactggccaaaccaatgtcaaagcagtgatagcgcgacagattgggatattgagtatcttgaagacggccaagtaattgcaatatcaagaaccgacaggcagacggctggtgagcacccttcagtgagccgaggaagggattgatccaggagagcatgtctttcaaagcggatttctcaaagggctcaccctcagaggtttccaggagaaaagcattgaattgtgtgttgtaaaatgcctgttccatgattgcttggggagagatggtttgcatagcatcccagaaatcaaccggggctttctcgaggaatagttggatggtgttgagaaggaatcgcaagctcggcgcaggtatggcgagatgatccacggagagacgacaagggtctatttccaaccctcgaagctgatgtgtaatctgctctttgtccagctttcggacaacaagctgcatacctcgccacaacctctgaatgactgcgaattgaggtggctgctgtgacgcagcccgcaggcccatcagcaagccatcgcgtactgcccaatcaaattcttgattagtaggaggccgcgagtatcttgtccatgactgaacagcccagaagcttcggaattgattagaatcaaaaagaaagcgagagactgcaggaatataatctgaaactttcaagcttcgctttgtttgaatgagtttgaatggctcatcaaaatattcctgcaaaaggctttcgttgcgcagcatggcttcacagctcagggtctcgaagattgacagcaatgcagccctgtccaagacatccaagctaattttctccaatgggatttgtttcaactgggtcgtggcggttgtcaagttacgagtgattctccgaatgtcccactcatcgattctctgggcaaacgcctcaatatcatcttcgtgatagttctcctccttgagcaggtccatgagccagattttgccgatgtaataatgcttgatgcatagatcacatttctccagagattcgtctagttttcccaggatccagttctgatcgtcttccacgccatccttatggtatgccaggatgcgcatggacgagagaaaactctctcttcgagccgttgcttcagctacgatatccttgacggcctttcctgattcgtccacttgctctaaatcttcgtagcgtccatgatcatcgttgtctttccggggacagaagaggtgggtggtctccgggagggccttgagttctctgtacaagacacaatctggttagttccagctcgtttgcttgggaaggttttctggggcctacctaatcgcagccagaaactccatggcaattgtagtctcgaattgtgaggtagttatatcgaaatgacagagttcggtgcatttccttcatcccatgggcagagcagttagaacatcgttttgtcgagaagtaacactgatctaaaagtgattccacgacctttgactcaactgccgatgagataatcaaatgacgtgtcaggaggctcaagtgaaggacaaagtgatgttgatagcagcgaggagtggcctcgcaaccgagtgccgtatttgaccacgatatgctgatacttcggcgatggaaaggcggcggtggatcggcgataatatttaaaacaccttctgcctcaaataatgagactttatgtttagccaaagcaaacgagaaggagaagatagcgaacaaaaatccccagtgcaaatgccggatgccgaagtatcattggcagattatttgggcggtgagattgatttcaacgcgtagacgcgctctattttacccaactaggacactactataatcaagactgcgacgtagcgcaaatttccctcggcagctacacctggaaaacacataacagtgcaggtaggaatcttaaattgccacattaagtaatttccgcgctgggggcattgaatagaatacatgaatgagaaccctatgccggctttgtccttttgatagaggaaagaaacaaaacaaatgaacaagaaccaaacgcaaaaagatcatccaacaagatataacatccagatgggaaccagacaccaggaaaccttcaaacgcgggtgtcatgcactttgcagagacagaaacgcttttgtacaagggataaataccataggccagacaggcttagtgagtgtagggcatgcatcggaaaaaataaaaataaaacattggagacagggtaagagtgagggaggtaaaaacgaagatcgcccccagcatccgactgagtaaacgaccaaaccagaacgcctgctttctatcagggaatataaaaggctctcaaaaataaaataaaacaccacagcatattgctcgtcaaataggaatggcgaggagaaatcacaaggaacgaaccagaagctctgatggggtaaagtcatcagtgacggttcatgaggctcaatgcaacgcaatatgcgctcctctatatcacattatgtacaggaggatcgtcagcagtccggaatgggtcctcatgttgacggtgtggagtttgcgaagattccacccgagaaagcatggcagcggaagtgaagtcgttgctttgctcgaagctcggtcgactccggtcaaacgaatgccgtgtccggtcgggagatcggcgaacatagtccacggactgtggtcgcggatcatggtcaagactggcggtgtagttggtcccattactgctgttttgactgcgggggttgtgggtgtttgcggtcggggccacggatgcagcatagaagggccgctcttcatcagtgtcctgcttgatggcgggctgcactggcttcactatttccgaagaggtagccgattcatcactgggagccacggccttcgggcctccctctttcgggggcattgggggatcttctatggcgtccagatacttgaatttgcccatagtcacttgctcgcggatgatatcgacatcaagcgggaagaacaccttctggatggagttgtacgtgaaacgcggaagcaagcaaaccacgacagtcatcaggaggacgacccagtaactcaacgagccgtaaacttcagcagcggaatggtagaattgaccagaggaagtgaaggaggtataaatgccggtccacacaaagatgagaatgctactgatggcgttgatcagagacgtgaaccaatcccatcggtaagtattcatcataatgtagatattactagcaatcaccgcacaggacgcgactagaactccgatacgggctcggtcattgatattgcgtccagtttcgttgacgaagtttgctggcgcgaataggaggtaaggcatgaagaaacaaataattgactggtacatgccatcggccatgtacaacctgtccaagttagtatgtctcgaaacatctcaagagtttgggggaggattcaaagtaccagaacttaagttgcgaccattccttacgctcgatacctctcatgtacagttgagggacagcaagagacaccttgtcgtccacatcctgatcgaagatacccatgaagattacaggcaatgaagtgaaagcgaggttgaccaagataatgtaggtatagtcgaagaggtaggagcaatcgaagtcgttgtagatacagtaccagaaaagggcgaacgtccacacgagattctgggaggagtcagtggtaatacagaataatagtcaataccaacgccacataccttataaaagaagttggccgtgcactctccgaggcgacggtaagaccatctcccatgcaccaaaagaaggcgctggaggtaccggaactgaccaattgcataatcggatgacatgacagcttgtctaccttcttcgccagcaataccgacaccaacgtcggcctcttgaatcatagccacatcgttggcaccatcaccaacggaaagagccatgatgttcagcccgttcttgaccatgttcacgacggcggctttctgtgcggggctgacacggcagcaaagaacggccttgcactgcttgcagagtaggaggaatttttgctttaagtcatcggagagcatcagcttcagggtttcaccatcaacgaccacggcatgtgtagcctcgggtggtgtatgatcagcacgagcagcaataagttcctcgtcagaaccggtcaatccgaaattttgcaaattcttgtcgagttcgtcagaggcctgctggtgttcagtctcgggaatgttcagcacaatcagctccatgttgttattgagtaggttgcaagaaaacccaatgttgatggcggtctcaaccttgtcaccggtaagaacccagagtttgataccagcgtccgcaagaagctggattgtatcgggcacaccatcctgaagtctgtcctcaatggcagttccaccaataagcatgagctcctgttcgatttgactagaaaccatctctagtttctcctcacggtctgtgatcgcagcggcagcgatatcgtgttccttagcccatgtgtagtattcatcctcactaagcagtcgatcggcaacgcacaaagttcgaagtccttccctagcgaactcctccaagtgctctgcagtctgtcggcggagctcctgttgtttgccacgggctagacgggagtaaattatactgtccgcacccttgcagaagaggcgtatagtaccatcgggcattcggataattgcactcattcgttttctagatgagttgaattcaagggtgttcaaaactgtatatgtgcgttcctcgcccatgacattcaggagaagatcgtcaccggctcggcccaaaacggtgaatccacaatctcgagcagtgctgaccaacgctgcctcgtcaggagactgggccttaaactcaatttgaggggggtcgccgggagtatgctcggtgataacggtatgacacaaggcaagagccagcatgaagtcctctgtacagtgcttctgccgctctccggattgtcctgtcaaatcggccacaaaattcggagcaacgaacgtcagttggtcgtcgtgcaggtaagggttgtcatgaatcccacgcaacagacccaacattttctgcgcatcggcagcaatttgttgtcgagccactgcggcctctgcgtcagcatcagctccctcgcgacgccgcatgccaacctgagcttctgtgtaagcctctccatatgccaaaccgttgaccgtacacttcttgaactccatcagattttgagtcaatgtaccagttttgtcagaaaaaatgtactcgacttggccaacgtcgtctgaaatgttccaagacttagggacacaatagatccccagtctctcgtagtacatgaacagatcgttgttgatgaaaagcgcttggatggtccgaacaatttcaagagaaatataaagcgaaatgggaaccaagttttggaacaggatgagagcggtccaaaaggtgacaataccagtgacaggtggtgtgcctccgtaggactcaagatcaaagtagtctagagatttgtctggcctggcccatgcgattccattcacaatacctgcgacaatacacatgaggaataggatgaaaaagttgtaaatgacgttccaattcagatcctttgccatgcgaggccgttttgccggagtcgcaccggaattgagcatgatcttgctctctccaccggtgaagaggacaacacctaggacccattcggtactcttcaaattgcacccacggagcaagatgttgttgatagagatgggctcaaccatctccttccggggagcttcagggaaacgtggatcgcgctggtcccaacgtatggcaccattgtaagtgtacaggttggcatgtggggcctcactttcgatcacaaactcggccttttcgcagtctctggcgtgtcgaacttcatggccacagtgaagagcttggcgaaccttcaaattggtttctccatccaagccttttgtttcgacataacatgcgccatccgggtcagaagtggacagaatcacgacatcggctggaataggatcctcgttgtacaaccggacaaagtcgccaacttgcagacttttccactgctctcgcttgaatcgggccttgccgggtgtctgcttggacatgtccaggatggttccatgtttcttgtccggcgttggctcaacgacgctctgtcgagctgcgctgttcggagacagatacttgttttcagggttgctcacgatcggccaatcttcgcgagcttcgggctgaggcgatggaacatcggtcatggggatagcgatatcttcgggggctaaggagttccgctgcgtataaatcgaggaccggcgatctgctgtactcaagaatgagtcgcgtctttgcccttcatcatcatccccctctttctctttcttcttaaattgagaaacaacccacttatatgaggcgatcgagcccctggtacaagccttcttgacacgacgccatatatcaatgttgtcttctgtcgaattgacattgttccattcaaccagtctgtaaaccggagagttgttcacttgattgtcagacactgttctcccccaatcctcaatggcatctttgatagcggtcacaacgataataacgattagaggaacggcgttcagaccggggttgttggcgccgaaaattggaaagcactagaatatcatcagccaatgccaactggggtggaagccatggaaataagggtatcactgcgtacattaagaatgatgacgaacaagaaatagatgttcgcgatgttgtgaaattgtagccagatgttgtagggaacaaaggtgagcggtgtatacttggccgtgcgaattttgtttctggggtacgtgatgcgcaaatgaccatcctcgtctcgttcggattccggaataggaatgctgaagtagattctccgattcggtccttcttgcgggatctgagattcgctattgcctgaggtgcttgtattgttcgattttcgcttttcgtctttcagatctgaccgtttatggaagcgatcgataattgaaacacgtttcttgacgccaccatgtccgggcgctcgtgtggtagcccatctttgtcgtttagtcggcttggagacgtggctgttgacctccccgatatcagcaccttgctcgttgttgtccccttcatcctctccattgtctccagggaagcgcgcggaagccatctaggctattggtgcgcccaagaagggcataaaactcgatagaaaccttgattattggtagctggctagcatccggtttgaagggccggaatccgacagcgctcggcgcagagaaagattgtcggtctgagtgcgttcacaggggttgaggacgatggaaacgcaaggtcataggcgatataagtctcgagaaaatcaggggttctatgtgcgcgtgtcgaagatgttgttgtcgaccagtttcgaggaatcgtccaaaactattcaaaacagggtttccgcggctgatcgtgatggaatatgattgcaatgcgacagccgaagggttatagggtgcacccacaaggggccattcaaaatactgaagggaaaaagaaagaaagagaagaagcaccaaagtagttattttgtgcttcgaggggtgggagaaagatagagtagccacctgagcttaccctcgtatggatctcagtacgggagagtatgtaatctcgttaccacccgtccgtgggtgcttaccgatggggccgggccaaccttccaaggaagatacctctgctttgtcattcaaagcgggcttggcaggaggtttttacacgcgtcgactgttctattggtataatttggtatgatatgtcttgcgtctcttttacactgcctctttctcttgttctcggcatctttaggcatcttcattcgtgttggagccagcacgactgcacaatcaccgagactcaaggtaggtagccatgtatatgatctcggactcaagggacaatacatgtaaagtccggtatttataatgtccagccccgttccgacctctccctgctaaatttctgactgtggcaatcggggtactcggcacttgaactatgggacgagatattgatatagttacggagtacatagtattgatatttaatcgctaagagacattggtggattcgtgtttatttcggcctcttttcactagtgcgcatcgcggcactgccaccgtcagcattatgatcgcttacaactaggcttaacgagggattacctaccgcgggtacggagtattctccccagttcttcactatgaaagttgctccgtactccgtacatatccgtttgatccgtatgcaaactctggagtaacggttattattggcccaccgcggttgttttcttcaccccactatgaagtattaatttaacaactggccttttcttgcgttgcaggttttcctagaagttgtagggtacagggtacctcgggacgcatcgatattcttactaaggcgaattttctgtcgtggcagtgtccatgtaatcgatctatatcctatcagaagaatcagacagtattgtgaccatggatttcctttttttttttttttcttcccacgcctcccctaatgatatcagagacccagaattcggggtcggagcatcgatcctgaaaccgacacggcacgagcttcccggtccacctgagtcagcttcccttcactctgatagttatgttttgggttagtatctgccaaattcccaagactgttatgcatatgggtcaaaccatcattggacccgttctctcatttttttatgttaccgtatgcatccctccttgtttcttggcaaaaatagaaaaaagaaaacccttggcttcaggagaatactcctgaacaggctcgatgatcggcgtcctcgtaaaacaagggttcgcggattgcccgggactcgtgttcccctttcctgatagccctaccaaatacccacgtatcacgggtgtgttcctctaaaagcttcgaaaccagatctcgaggcaagggtcttaaagcaaaagcagttgcagtactctgtacagtagtgcaacgtttgaatggcgtgctgatacgacatatgtacatttcagggtcgtcacccggtcgaccacgaactatagtagtgggacccgatgtttagcgtatcgtcgctttagataaagctaattggagtgtcattttccctacccgttactccgtagactgacacagtaaaaatatgtatcagaaagaatcggccatttccatcgcaagtttgatgtcgatcaaacgagatcagtagtaatcgatagtagaccagatcaaccagagatcgccgccactagggatgtggctaccagatctacaatctacaatacgataactaacatacttggtagccaagtatgttttcgacagttcaaggtatgtactcccaatgcacacaggtcagttcaatatcaatttgacctcgatatgagttcaattagtcttaaagtgtgggattggatggttagcgttccgaaggttaaaaatcgccccgtccaggttccacctgagcaacaaggtcaggaacaaagaaagaccgatgagtcagcatctcattgtccacggctgacatcgcgccaaatcggcgcgttcgacgcgatatggctcttgttttttttttaacgagaacactcaacatcactcactcatcatgcagaccataaaagagttatggcttaatagacctacattcgctcatgtcaactcgaacagcacacctgagacgaagagtacacctcagatgaatgaaagcgctgaactcgcgaccgaatcctccgaccccccctcttcctttgcatttgatcaaatattaccacaatctgaacaagatgctgaggcccacctaaatgcggcactgtatctatcaactcaggacaccctccttcagtcccctacattgcatcaaagtttccaaagtatcgactcagttaccggggtctcatctctgaataagagcctcaacggatctcagcgcatcatcaaggatggcagagaggtagtaatcagctcggatggagaagacacagactcgatatgctcgttggaggacccaaagaatcttttcgctccaacgtctaaggacctgttcacaccggccaaattcactcagaggatatcatcgccaaagaaatacaaacacaacattgactctctagttcatgatgcagtggatgataatgaggtcgaagccagcgtagctcgggcgaaagccaattatgtgcagaagcaaccgaacggcatggagcacggaaacggctcgtccggcaccgctctgaatgaaaccatgttgatctctgctcttggcgagaatgaagacggtgttggaggtcaacgtctgataaatgctattagaagaactgatgctcttgaccccggccgcgcctggccattttttgattgcacacagacattgccgtcagccccccaatttccaagtgatctggtcgcacctgggacgagtatggatatattaaggggtgagctttaaatgagtcgttcgctgcttctttccatgctgaccaattgtagaatctgatactcgcgagcgccagttcatgtcaggcgaatttattcagatggctttgtccaaagggcttttgccggacgaattcgttctgtggatgttttgttccagttcgtctcataccatgctttgcttattactgtcaagctaacatgcctttcagtaccctatgaacgccgagaggaattgagcaatgcctattaccgaattattaaggtttgtagatgctcttatatcaaacccccattggtattaactaattgaatatataagaatatggatcaggaccgcctaaagctgctcatccgtccggccgatatcaatgaacttttctcacgactaggtgctcggagccaggctttagatccttccaaggagattatcccaattccttcccaatgtatgatttgactatattgcctgtggctctggatcctgctaataaacactgtcagatattactccagattctgcgttgaaagaccatgcaaccttcgtttcagtcctgagattacttagagaaactgctggcttgtgagtttccactccctcaaacccgcgacaatgtaatgcttacaaaattgtagattcgcagaagacacccaagagcaagtggtgctcctactgctacgtcttactcttgatgtttcgttaacagcggattctacggtatcgtcggagcttcagtggaccataaatgctgtcttggatcctgagaatttccatgaaaccagtgcccaagattcggtaagtaatctcctatatgttgtaccacgttcaaagccaacgataccagttacgtcgagtttgcgccactttccacgccacgatacacgatgtttgcatccaaagtcaagttgtgcatcatatcctacccacatctccatggtttgcactgataagatgtcgcctggccgttgcatttttactacggagtcccggtcctctcaccgaaccccctggagagttgcttgatatcaaacgtattacattgttactgctacgggatgagcgtttccaagttaggcgattcaaaggcatagccgactacgactggagggaattaatttcactcactgctcttctcaacgtcgcgattgattcgtctgcgctagcgttgaatttcagcagtactcaacccgagaaagactatgacgctgccatcgacaggctggcagctcagatcaaaatgatattttgttctattcaggattccggggcctcacatgtgacacggacagtggccaaaagtgaactcgaggccttgcattaccgaattgtctattcggttcggtccaagccaccgccgaaaaccactattttcgagtcacatgtaaaggagagagatggtaacattcggagcattttcagcacttttgctgcgcttgctgctgaaaagcagaatcccgaggccaagcaagaaacgaattcgtttgcggcgccaggcgacgcggataatggtgacaaagatattcccatccgcgcgcatgatcacgtatcctgatcacattggcattggcagtttgagtcccaaaatctccatttcactgaaatgggttgatgatggaatacccgcccagtttttcccgtctgccaccactctgacttacgacccttatgatcatgactttgagccaggcgttttattacagtataccaatgtattcaagcacgtatgtagaatgagagcaatcgctaaaagagttcggtcatattccaaaggagacttgaactgtgcaaagaaatcccctctatttgtgaagatggccaagagagacaaagattatctgaactataacacacgaaacacagcagtcgcaaacgtgaaacccaagacagaacaagtgatacacacttagtcgtagaatttccggttcaagttcttgccaaagagcgtctctcgcactgcaggaagagcatcaatttccagcagccgcagacgctcctcgaaagtgttgttgatctcaatcttgccttgcccaccgacaataaacacaccaccagcactgcgacctagttagtccccttggcgtatattgagagggagagcgaataaactcacgatccttctggcaatggctccgactcgtccaaagtcacggtcacctccgagccaacatggtccttgtactccttggtcgcctcctcaatagcatccttggtaataccgaagtccttctttcgcgagcgaatcgcaacgttatcctcgttcagataatacagaccctcgaggaccagccccttgagcatggcctggtacttcttctgatcgtcggcagccaccttggaaaccttctcacgggcattctggaacaactcatcgagtagctcctgacggccacccagcacgcggagtcgggtcttgttagcgagtgtggaccgggtgatctgctgggacatggctgcctgcttgaacttcttctcgtagagggtatcgatggccgcagtctcctggcgcacgagcttggacttttcgatagcaaactcttcgtcggccttcaactgaatctctcgggccttctcaagtgcttcttgtttgatgaaggcggtcatcttgcggagctcgcccgcgacctggattggatggccatcagtccaactcaagcctcccaatacttagagtaaacggcgaacatacctgatcatctgacagagcatggctttgtgacattttggcggttcactgctgtatcgcctgttggggtggaatgacgtggggaaaagggaaaggatgttgtgtccaactaagctcggattgcgttgccttggcgttccgcacccaggtcctccgcactcccctcgacaacttgccatttcagcgcgatcctatcgttccctataattttacctgagctatggcttctttactccggtagtttcttctacttgatgcgcctttcctatcccttgacccgaccaatgcacgatacacaacatgggcaatctaggtgacttgtcgccggagggaagtgttgcggtaagactacggaaatcaggatatacagcgagataagatccaaagctaattatgtatcaggttggtgtaatcgttggactgatatcaaccagcctccaagctatcgggctcacgctccagcgcaagtcgcatttgctcgaggatgagaagcacccctacgatgtgcgcagacccccctacaagcgccgacgatggcaaataggaatggggatgtttgtcatttccaatattgttggaagtaccatacaaatcactacacttccgttaccagttctctcgacgctccaagcggtcagtagttccccctccatgcatgccggagattggttgctgataggaatgccgaatagtccggactagtgttcaatactatatttgcgaccctcatcctcagtgaaccctttacccgatattctctcgcaggcaccgttctcgtctgcgccggcgcgttgttaattgcgaccttcggggccatcggggaacccgcacataccttggatcagctcctggaccttcttcagcgacggtcgtttcttctgtggatgggtgccactacactcctggttgtcctggtacttgttggtaccaaaatgctgaaactcttcctaccgtcctcacgcgcgaaaccctcggcctctggtcatttttcaccacatctactgcgattgcaaagccgaatgagattgatccgcggcatgagctatggatttgtcagtggtatactgtcggctcactcccttttgctagcaaagtcggccgtggagcttctcgtgcgcacaatggtagacggtgtgaaccagttcaatcgttggcaatcatgggttatcctgctaggaatgatcttcctagcactcacacagctattctatctccataggggcctgaagctgtgtagtactagtgtactatatccttttgtgttctgcatctataacatcattgctatcttggatggcctgatctacttccggcaaatgtcccagctgacgggcttccacgccggtctcatcgctttgggaacaatgattctcctgggtggtgttttgtgcctgtcatggcgacttgaggatatcgacactcataccgctgtcaccactttgggttccacgcaaaccggacttgggccgggtatgggaatcgtggaagagcactctccggcatcacctggtttgctggacggtcaggatgaggaatcacagattagagaatgcgagccacttctcaacccgaaaacccatactcgccatctttcatatcagcggggaagagctccgagcctgccactcaacttgcattttgatcgcgactcagctgatataaaccccgcatctatttgggctgaactcgacgattcggactatgaatctaccgatggacacagacagtcctccatagatcgcctgcgtagcgtcagtggtagtgcaaccctcaacggctcattgcggggtctgacacggcaatcgacgaccggcgctattacacacgatcgcgaaagaggatctcgccgaatccaagaaacatcacgtgaggacccatggcttcgcacctcaggacctcagagtgggttatcggccgtccatcgtaaacgtcggaggggcggggatccgttcacctcatcgtctaaccaagacatcggtgggtacggaaccatccaaggggatggcgatgatactcactggcgcggcgactcccctatcattcgttcgtctgccaggtctggtcttcttaatggctcaaaaagggctctggcaggtgcctggaggtttgggagacaatatctgcctcgatggagtagcccgccggctgggattgacccagaagatggctcttcctcatccctactcccccactctggcgtccctcttccacgaacacactatccacagggaatcccggttcctgaatctgacacctttcggccatcgtcatccccaaccacctctatataatatcaatcttcgctccaacctataacccttgccttcaggacactaccacctcgggcttctctttgcttttcgcctttcaatgcctatgtacagcggtccctcttccttggacataccgcaatccacttatgttgcttccgtcgctcatagctcgcggtcgggaaaagaccattgccggtctctcttttgtgttctgccatccactgtctagataatatgatatgataccacccaatcgatgatatagctccacgcgaatgaatataagaccctgatacaattcccgtgctctatatgataatgcagagattctaagaacaccggtcacaatgtctgccaaaagtcccttggctgtggcactgacctctcatatgcaggtccgcgatcctttctctctacatgcacgccaaggtatatacgtctttcggtttgaacgtagattggccagatttgggacaaagtaccagcccagcagtcatgcagaatatcaaagtaaagtgaatctcattggtatggaaggttgggaatatatctgacaaatcggatcgtattgttcgaactggactgaattactacccgagtgtccagaggccgttttagactacatggtctaacaagtacccagaaagcgagaatatacttcccattacgagattcggtatcctcttaggctgcatatcctagcgggaccgcactacatggttggaacggagcaggacccaagtctaccacagaccactacgaatacaacaagcaacaaaacaaaccaagagaacagaatccgattgctccgtaccatacataatgtaactcagccatgagccatatcggtgcgaagtccgaaccgaacggcgttgagaatccgtcataaccaagacagacggtctcgtcatggcatagaatcaacagaaacaataaacacacacagcttgagattagacaatgaggaaaataacataatcagtggacaaagaaataggttaaaactataagagcaaaaaagaccacagaggaaaagccacttcgccgacgagtttcaatgcaccacgaacacctccatcctccgccattatctaggtagaggggggaaaacaaaagccaaatttgcctgcttgcgctctctttctcttttcttgaagttggtttcttttttttgacggacattttttttgcgtaagttttttttggtattggaaagccatagttctcagcaaattgggggtctcctttttccgagatagaaggcaatatcaaaaggataaaccagatccaatatcatcaaagagagaccggaaggcgattccagcgcggtgcttgacaatttacaaatagtctcacgagagtgccctgtagaatggcgcatgcagatacagtacgaccatttccgagggaagggtgtgatgatggatcggcacagagggagacgggtatcaaatgaacgcgagatcgaggcgcagggaggaaagaacagagagaagaagacgcagcatcggggacctttagcaaaaaggaccccacggatcagatcataattttaagcatttaagcagtgggttggtgctggggcggcatgcgaccgccgaccggcatggggtactgaccaccagcctgctgttgctgctgctggaggttttggtagtacgccatctgctgctgctgctcgttggtcatgtagcctgggtgaatacctgggcgcatattaccctgcggtgcgttgacgttgttgtgagccacatcttcgggggcctcgggggcaacatcgggggcgtcgacaccgttctcactggcggctgggtcgggagcgttgaggcatgcctatcaggatgttaatggatgaaataatatcattgaagtagaccatggcttacctggatgaggttcttgccctcggccttggtgaccagcggctgaagtttgggggtagtgaaggtgtagacaagaccggtttcagagacgaccaggagaagaacttgagtgccagtcaagacagagagttcataggcctatagagtccgatggcgattagttaaaagtcccaatcgatccaagatagaggaaaaagcctcgatcggggaactgatgcggagggggcctcgggacgcgacgcaccttcttcatgatgccggccttccgcttggagaaagtaatgtgccgacgcgacttatcctggataaacttgatctcgatcttgcggcgctcacgaccgggcttgtcatcatcatcatcttcatcatcggcgctcatgcggttgcgcttggtgccacgggcgtcggcgccgttgccgggaaggtcatcgtgaccaggggaaagcttttcatcaagaaccgcagacatattggcaataaagacgaacaaaagcgatttaatatgggggggggtggttatgatttgagggggggataccgaaaggggaaggcaagagatgacccaatcgagtaacgcgtttataggatgtgagagaaagggaatgggggaatcgatgggggggggggagagcgaagaaggcaaagtgcgagttgcgatgggcaggcggtctgttacgtggatcacgtgtacggctggtatgagtacaatctgtacggtcagataggttagagtacttctggtactgatgaagtttctatgagacagaagtaccgcgaggattatgcttgtattgtcttgtaattgagcggtattcgcctcctccaggccagacacgattcttggctctgatcgcttattggctgatttcccttcggcccccccgttttccgttttttgcccttttcccctctggtctggactctttttcctttgttgctgatttcccggacggccctaattttggttatttagcccttttggacttggaatcgacggtaataaatacgaaatattgagaattaagaattaaaagagatatgtttctttcgtactttagtacttcattccatttcacatgccgcgacggggcagaacttctcaaggtccggtgctatgtgattggccttgaaacatgccatatgagcatttctatcaagacgctatggtcctatttcgaggttacatctacaaagtcgaatgagtataaatctgtgctcgcatcacacaagcgcgggtcgcacctactttgtggcacggaataatggccctgtatacagcgtactcgcatagctgcattcagagtacactgtaaatagccccaaagcgcatccatccctgtcaccactctcttatctctcttatagccattctcatcccctttctgattgcaaccacaagaaccgacctcacattcatcagggcaccagagtacggagagtactaggccacggtctcgacacaataatcccaggcatttcagatccccttgcacacacatgcataccttacatagaaactcgtagagcccctagggatactattttggggtctcacggacgtagatttgccaaggtacacaacaatcggggtggcttggtcagtaggccttataataaaagttaggaatccagtcagggtaagtttctgcctcttctattcttactcatgttattactcccacgtcgacggaatacagatgtacaatatctgcaatttcttcgttgatctggtttgatattgctctaagcatcaagtcttgccataacccccacctcgaacctgcccaggtgactaccacgcggccttaccgaatggcaggtttcttggtcatatcgacagcctcgagagcgaaggtcgaccgctgtcgactgttggtcatcctactgaatccatataactagcaacaatatgcaaccagagccgatcaacgggccgatccgaaaagccctagacccgatgcagcggagtctagctcgctcgcttcaaggttacttcctgcataccaaaaaaatacctcgggcaacattggaatgacgaaaactgatcatattcttcacataatgaacaaaggtccaacgctaatcaccaacggagaccccaaaccgggtctgctgtcaagtctatttttacaaaaaggatgcaaggcatagggcacaaaaagtggcttctcccaaaagcgcacttgaggccggaagacatggaggaaataggaaataaggaaagataaaagcaagaccaagccgattaagtgtggtaagcctcggccaaggcccgcatgggcctagggataggaagaccgtaaaggaaagccacataacatttcaaaaattgagatacaccgtcgggatatagagggaacacaaagtcaccaggttcctgcaccgtactggactccgccaatgcaacgccggataaatgaaacagaaactggaggacgcggagggcaagtcacgatcacgagtctcatccggaaagaaaatggctgttgggttggtcgattttgcaatcatattgggctggtgtcgtgaagtcgggaagaacaaaaaaaggaagatgtgtagtatttgagaaaataagaaaaagagcagaatcatgtgcaacgaagtgaagaagtacgaccaacagtcccaaggaccagcctcaagtagtaacggtgcatttttattgctggtaagtgccgcgaagatgatggtcactcacaccaccgccaccaccgcccttaggaccgagccagactatctcaatcacgctgtggccctcatcttcttcgcgaacatagaattggtgcacgttctcaccgacaacgaatgcatcacgaagcaaccaccgatccttagcaacgccatcttcctctgcgggacgcaagggacccaggcggtcttcataaccgcgggggtcttctggccaggtcttttcggtagcatcaaagttgatagcatcatccgccacattctcgccgtacgtatatttcaccagcgagtagccgttggtcataacccagaagtgacggagagtctcaccagtagcgctcacagactcctcctggtcaaagacccagcgacggagaacagatttgcggcctgcagcagcagaaacggtggtcatcttgaccacgtccttgctgtaccaactgttccagtggtgcattgattcgatcttgcggcctgactcgtaaacaccgtccacggggtctgccatgtccatctggtagagcgaaggccacagagtcaggggggtgtcaccgaaccgttggatacactggccaagcttctggtcaccgggctgctcgccccaggactggcactcctcgtagtgcttcatcaggacatccaaaagaggcttcgagacaaacacaccggcaccaccgaatgcaatgtggccgaaagtatccacctgccagctggcctcagacaaagatccaatgtagtgcttcttgctttcatcgaagagcttcaattcctcggcgatagtagggagcgacaggaagaaggtatcatcgtcactgaacccaacccaggcggtgtgcgggcggtgcttgcgaatgtgctcggtgaacgcctcgaccataccaaagtaacgggcagtgaagtcgagaggagaggccttgagggtcaagtccagaccgcggttgcggaagtaagtctcttgcttctccaggtcgtcgtcagactcagggaccagaacaatcagaccggccttggtgtttccgtatgagtagagcaaagagggtagcaggcgatccaaacggtcgactgtagtggccagaccgaaaagaagcttggaggtttcctcgacatcgtcatcggcggctacatcgacgtcgatgatctcagggcagacaaagttctccggcttgttctcgggagacacgaccataccgcgctccatgacaaccataggcgggagtacaggcttctcgatttcctccaaagtgtggaactcggtgcgagggttcacatgacgaggacggaaataggcgcgagtgtagttcttgcgtgggagccattcggggaagggaaggggggcagccaatttcgggtcagcctcacaggtgttactggcaggctgctgcgaatcagattgtgccgacgtttgtacttgaggttgcttgtttccactgaaggaggcacggtcaatcgggtgcttgaaccgaaggaaggctgagcggtcgtagcgttccatgcaaaagaaaaatattccgatggtcaccagagccaccaacgggaataccgtcttcatccgaaatagaggcattttggctcttccagtattaaatgacgacttttcaaacatgtaaatagaagcaggcgaggcaaaagcgaaatcggggcagatgaaccctgtaattaaaagttatgggttcgggcgtgcgagatgtcgtatcccggaaatatcgtgcagaaaaagctggtagcaaaacgcagtttccacttgagagaagggtcaaagaaacgagtgtctccagagcggattaaagagtggcaggcaaatacagtgccgagatatttcaacgagaggctggcagcgtcgggacctgcgacacggtccaaaggggggaggggcgtttgtaaagggaagtaggaggactggaagagaatagaaaagcaagactaacgcggctggacgatgtgcccagtccgagtgaaaagtcgatgagaggatgtaggattgagtcgtgaagttgttgtaggaggaaagaaaaagggaggccgtcgaagcaattaacggggacaggttggccgtgtatgggtattaccgtaatatattatttagatcttttctttttttcacttcttttttcaatccgttttctacatcgatgtacatgtctacatatctgacgttcgcgccatctgccgtttttcgtttaatatgctgtcttcagtgatatttggttatattggagctggatattgatatcttggtattcatcgcccggttgcggtgtgcccggttgggatgcaggaacagagccctgcgataacatcataaatgatatgtggcttatactttgtttcctttgcttcgttttgccggttggacctaagtgtcgatcacgacggaaaaaagaatgccgttggctgggagggatcatctccctcccagcagcttcagtggaatacgccgccatgaaaccggtgatcagcactggggttttttttgcatatttttcccctgtctcgagcacaacaataatgtttttgtctaacctgggcacagatgtagtccttcaagtcggaaatgggcatattgaccttggcattccagaacaagcatgtttcaagtatcttcaacgttgagcaggctgtttgcggcgaggatgcaagctcgcgcgaaggtgccgatcagctgtttgtggcatcatacataaatttgtacgatagaccagaaactcatctctactaataactccgattgctctctccctagcgtctctacatgtatatgtatgttgcacggaataatgagtacttgtatgtacatatctgcatatagatactactatgtatagatacactatggatccgaattcgtcggcacattgcacctcactgactgcgcctgaccctcaatcatccagcaatggacaatataagcgactacctaggtacgacatccgttcccatcctgagaccccatcatgatgatgtgaatataataaataaccacattgaactagaaatcacgtcaccgttatcaaggtagcgcttggaccatcgaagtaaagtccggagtcttggaaagtgtgctaactacgaactacaatgaccccagtatcaaataacggaaaggacaggtatacacaattgtcatccatattaagaggcaaaaaaagagccagggaaatgatccagagacgatcgccctagcaccccccagccgcgtcaaccagtcaaaattagccggaggggcaaatgaggccgacgccccccacagacacgcgtccttcctgacgacgttacgacttgtgtaccataatgatgggcgctggtacggagtatatatgtgatatctgggtggagtttcagcccgtacctaacctgttattccccctgttatgtattcgtgtcacccagggatgctccgcaattcgcacggtatattttccaatgaaaaaaaggagagaccctgaagcttatcgggtaacgtatttccagtggcgatagtatctcttggtccatggatttcctcacagggtgggccgagatcgacaaccattgaaatggccctggtagtttctattttgatatattgtacgagcggctcaaattcctcaatcaccatcacggctgatgacgggcctggttttgtagtctcagcatggatcagcaactcggtcgacatgatcgaatctttgatggccttgcaaggggtgaccgatcgctctgcgataagtattcgtctacagcccagcggtcttgagaccccggggcggatcttcttcctgactgttatttatgcacttcctatgtcggaagatgctgggccttttgttggctcctgcttttcgtggatgatggcaacgtggaccttccagactttcgagttcgctctagattatgacgggactacgacgagcttatctccacgggcgttgcgcgttacatactcttcctagagtttaatcgccaagacttcatctatagttaatttattgatttatccaagttggcggttgctttgattcttactctattgaatcactttaagtaccagctatggaatgccgattggtcatgtatggacaccaacccgggaagaagacattgatttctctggaatcctcataatagtcagaggttaagtctcccttggtagagagccagtgcaagggttctccctgggcgctcaggcctctctccttgggtctgcatgttggtcttaataatctgtactccgtaagttggttatggtgctcgactttgtaccgagtcctttacttatgtacgcgatgctgatagtgggatttctgtagactctgaactatttggtaattacgacaatataataagttagaaaataacagagatgtccaaattcctctctgtcaccattggcataataggacgggtactttgacttctggattttccggtgaaccacttacgaccgaaggcagtctctgggacctggctatacgttgggatatcagatcccgtaggcactggggctggagattgagtcaaagttgccatggtttatacaggatattggaagaagatatataaatagaatatatcacagcgagttggagtaaaaggatcttgttatagagacaataacgtgcattggattgcactatatcagacagataggtgttttattaagatcgcgatatccttggttttgaaacagccgctaatacctacacggtcatgtttgtggattttaagcttgaatggtcgtcttggcattgtggtcacagcggcaaaagggggagatatcgcgctcaagtgtctttctgtcaacggtattttctgcatagagtaactactccatactctgttatagaacgaccagtgcatttctttttccgtgagtttggcgatgtttagtttggcaatacgccgcataaccttcactttatatgcatataaagtcgaagtgcctcgaactgctcgactttcatcctccgtcgcctcaccatccaccccattcgcctagacatttgagatcctagattgagtctaaaagcatacatatttccgagtacaatgctcctcacatgctcctaccgaaagctagtacatttggcaagcgcctgggaatttggccaccagaatatcttctatattataatatcagaatcttgacattcaataagttgcttctgaggctataatataccacactcaaggttttctggaagattgatcctggcccatacttcaagactgctctcggtcttccgaggattcgccatctgattcttcagataacttgcaagataaagcagccatgcttccttccccgtccaatacccgcgctggatccatagcactttgatatgctccagagtttgcaagactgtagcccccctccctccaagtcatagggccagtactggcacctttatcccatgacaaccgaaactaagagcctagtcagcggagtccggctataatgaccctaataagacgctcaaacactgcgtaattcttgcccctaactgctagatagagtggcatctgaccattcgggttcgctccatgatccagtaaaaaggtgaatacgagctgaagcctaccagcttcttgacgcagcataggctcttgtgcattgcccatggggatcctcaagcgaatatgaaatggattattttccagttgtttgtttaaactacaattcgcagtggtcgcttgccatcttcatagacatattccagatccaccccttcaccaagaagggctttcaccacgttgactcgatcatatttaatcgcttccgctagtgtagcttggtagttaccatcctatattgtgcattgtagagtttactctgtgctattatttccatacagagctagttccttttctttttcctataatatttctataataccgcgaagatatatcctggcttaaacggtcaccccttttggtgttcccttttggtgttcccttttggtgtttaaaaccgtcgactgctctgtgaatacttcgcctctcccccactctgatacggtgggctgacattcggtgggatagaatattgtacttattcatatccacaggataacccttcacatcacctctaggaagcaacagtgataatatgccacagtttcaatgtcaggtcccgggctgcacttcgatgtcatattcgtcgcaatcatgaagttcccggacgatctctcgctcgccccatacaggcctgtatgatatgaggtgtcggatgattaaagcacggttccaaggaggcttgccatgtacagtatagagtgttctttgaagcgaggcatgtgtatctttgatggtccagtgcgccccgatatcgaggtcgctcgaccagattccgaagaggaaccctgggagtacgggtggtgaagatgatttgatcaataccttccactaccttcctcgagaattccacccaagtatagaagaggtttgaagggctagatccgagctgatctcacttcgagagacaattgtggcaaagccatcggccaccgcactaaaatcgtgggttgcattttggtatggaaggaagaaccgtacattagcctactgccttctgtcgtggtaattgaaaccatgtgcggaaggcgcggtgtccccacgtgccgcacgagtataaaccccccctcccccccctctccccctctccctctccccttcacccttcccaactcctacttgacatgcgtttctgcattctctcccgtgcgtggtatgagttccaaacgtgttgttcggtgcagattgtatgaggcgttgtgatataccgttccttggatctgatatattatcggaccttgtatacatcgacctcccgatgatttttgtaccccgctgtattcataggacatcatgtgaaagaaaaaagtcggtcacaaacaaggacatatctcagctcgtagatttaaatgctgtacaagaacctggggtttcgatcgcccatttcttggatagcctgctccgagagcgatgatattttgtcgtcctccaatccctgggccctgcgtttgttgataacccggtaggaaacccacatgacaccatatacaacccccgcaaatcccaccattgccagagtgacagcgttcccacggacgaagcgcgggccttccgaattaggatacaagaaaggggacataactccgctgatgttgccaaaggtaagctgcaagccagttgcgtaggtgcgttttgcgtatcggggcagattggtaggcaaccaggcgagaggtaagccgacagcaacgtaaagtcccagggcgaccatcaaggcaccaaagtaatgaacacccgaggacgagtccgaaatcaagattccatagccaacgactgagatagcgcagaagagacatatgaaaaatgcacggtgttgggtgcgatcgctcaaccaggcaacgcacagataggcaaaggcacctagtgcatagcaagggattgtcaatgcctggacctcggcggtggtccaatttcccatgcctttgataatagtaggaaggaaggtactatatccatagagcatggtatcaataccaaactggccaatggagaacgcccagatcttccagtctaagacaccctcttttacatccgcccagtgaaacttctgtgcagactctgtttggccgatataacgactccggcgaagggtaacaagcgctcgctcctctttgtttagataataagctgtgtccgggtcatctgccaaggcgaaccaagtcaccacaccaagtaaaactgtcggaatcccctcgatgatcatgatccaacgccagccgcgaagtccacagatgccgtccataaacccaataccataagccagtaacccgccaaatgctcccgcaatagctgcactgctaaagaggtagcttgttcgcaaggcaatctcacgtttgctatagaagagagtgaggtaggtgataaagcccgggaaaagacctgcttctacgactccgagtaggatccgacaggcaaccaagtcaccataatcctgagtgattcctgtgagggttgcaatgataccccacaaaattgagatcgtggcaatataccgagacggccgtagtttcttgagtacgagattcgaagggacctcaaagaactgaacgtgaggattagcgtccgtgcggtgactgaattgcgtgatatacatacacagtaggtcacaaaaaggatagacaccgagacttggtactggttgccaacaagccccaagtcctcttccaggccgtacaatcgtgcatttccaatgttgactgcatattcaagtcagccaatgttcttgattccgagttggcacaagctagttgcaatcacaaagggatgagtcaggcatcccacccccacgtacctcggtctaggaaactgaagagatacaacaacaccacgataggaaggatatgcaggtcaatcttcctgatcagagttttctcgatctgttcttcatcaagagttggccctaagctgatttcatcggctgggccgaggtcaggctcagcatggcccatggtgcgaaagatcaggtagaaacaatgatagtggaatggactcggcccctgggcctaggtgtgtcccccgaggtcacttcaattatgttccaaggttaagaaaatgtcaggccgaaagcgagaaagaatcaaagttgccaagcgccaagaggtcgggtaacccttgcagccgattgataagagaaacctacggagtatgtaactgtgttatactttttcttatttcttcggattttgtttgcaagtcgcatcataatttgaaatgtagatattaaactaattaccaatgtacctgcgtagtcctggttaggtagtcctgagtatataacttcctagttcgttgactacctcgagattcgcatatgctgacgtaatatataaggcgcctgaggtctaacatggatgcatgagagcgtgatattgtcaatacaagtcaagtccgatatggcaagccctattagatctattaataggacctagagcaaccataggacatgtatctagctgtagtaaattgttgtggttgtcacgtgccgatcacatgctgatgtctggtttgtcaggcttcacctagctaaatcgctagatctcgatcgttgtagggaatgtaaccttctacatatccctcaccgctcaaggagatcttatgcgagtggctgagaagcacccggaccttccttctgggtctcttgtcctcgaagatcttccagaagtcgttgggcctgtcgagctcaccacggacaaaatcaggactgtgccgcatgatctcttcgaggagggcgtttaaagcccgttgaaggtatgattgttcattctaactgaaggccaaatttgacgacctgaaactccaagcggaacagaaaattccctcgaaggctctgggtgatttaaacctggaggaggtcgagagtatctttgagatccagccgcttcgatcggagaatgaggagctgggagatgagtgggacttacgacccattctccgagaggagttccaaaccccagctgcctttgacgaattctacgatttcctcagtaagtactgtgtccttatggtttccaagtttcactcactcatctatgaaaacagtgaaatcctttgaatacctggacgttgcctaaggaaagtccacccgaaacgaggcatatatacgctctcgtttggatatgatccttaactttgtgctcggctttataaagaaggagggaagcttactcgccagaaaggagctatcgtagggatacgagacgcacttttcctatacaatagatatagcgggagttgcaacatttctttgctaccttgctatcttactaccttgctatcttgctactatgcttggtctatggaacttataacatacctaccaaaagtgaaaccaaaatcatgatactgtagctcttatgatataatgcaaaaatccctcgtctggcagcatggggtgccgaggctttgaagtacctttgtggctgctccttataacgaggagaagacactaagttttgtatgatcatattttgagtatatcgcctatatacaattaaagacgttttggttgacatgtcctattttgaatattctaatagggttgggggatcgggtcggccgggaattacgttaacaactcggagtacctacctgtagtgtgcctcttcttagaagtatcaaagtctacatgtaccctagacagcaaaatatgaaggtcagcagatcaggatcgaccggcctagcctgcttacctaatggcaaatcccgctgtcatttttgcctatttgtggctattatttgctgcagaaagaggaactatcactttctgattccttctgcaccatattcaatttggattgatatctgccatgaacgggactttttcccccggcgattctgttccccccgcaatgcactgctgacggacacacaatctcttatgacttcacttctcactatgagaaatccttcacgtccacgcgttttacagagcttcacaatcaacttctgaatcttgctatttgaaggtttgtttttctttctccaccatagggagatctagaataacggcatcctgggtctcgaacaatcaaaatccatcaaaatcaaaaagtaccgcttcaagtggaccaatggcggacttagtcattccttcctttgggaggctagttgcatccaaaactcttgatggccatactggcttcgtttgggatgtggctctttccggcaatggtcaaatcctcgcctcaatttccaatgacatgatgatccgtctatggaacgccaacaccggtctccagcgcggcgccgcaagaaacaacggccattccacgtgggtgcgctctgtgaggttttcccccgcaggtcgattcttagccactgcttccgatgatatgaccattcgtatcagcgacgtgaacaccgggtttacctaccgcatgctgcagggtcacactggcaaagttcgagcggtggaattttcccccgacggcaaaactctcgcttcagcctcagatgatttcactgtgcgactgtggaatgcaggcttaggttcgctggtcaaaaccctcaatggacactcgggctgggtgcgcgctgtggccttttcgcctgacggcaagactgtcgcttcaacctcggacgataatacaattcgtctctgggacacaaccaccggcaaagaaatccatcgattaaatggccatgaatcctcaaccagggccgtctgcttctctcctgatgggaagctgctagcgtcgggttcgcaggacaaggacctgcgcatctgggatacgaattctggcgccatgctcaacgtcctccggggacactctggacctctgcgcgtgatcgcattttctagcgatgggaacctggtggcatcagcggccgatgacctgacaatccgcgtatgggctgtgccattagggtttacctgcgtccgaatattaacgggctactccggatgggttcgagctattactttgtcgcgcgatgaaaacgtagtagcttacacgtctgatgacatgactatcaagatttggatttcggcgtgattttctgtcgtggaaggaagatccttctcgttgatgcgcgctttgtgttgaatttctttttatctgagatacccaccaatgttcttgattcttcagctcgcatgcaatttcttgcgattagcaatcaacttatttttaagtgatgaaaagccggaaccaaaacccgtctcctttacctcgtttgaacagttgggtcgaagtcgctagaggcaaccaagatcttccactctgctcaagaacactacatcaggttttcaagtccacaagtctacttatataaaatggcagatacgcaaacttgttgggtgcttcgcagatccctacctgttcccagtgtctgcattgatatgactcactcggaatattttccaggagtcaatgggacagcatgtgttgctactatcccaatcgcaaatgctttttggcctagtaatctgctgatttccatcgaaatttctgactcaattcgatggaatgtgcccttcaacacttatatcctgcagtacatatctttacttggactgaaaccatgggcccatcaatttcaaatgacaatcctcaccaagtctacgatgaagttcataaacgcgcaatcacggaaaatgccttccaggagaaggctgagatacaagaaactcaccagtccttgaccattgattttgaggaggacgaccccggaaacccactaaactggcccagattaaagaaatggattatgacaactgttgtgtccctttcagtgtttctaatgccactgtcttcgtcaattgtcgcacccgagttgagcaccatcaaaggcgaactgcacatgagcagctcactagaagcagtcctggtcctctcgaccttcgtcctgacctactgtctcagccctctgatactaggcccactgagtgagatatttggaagagccacagttttgcactcgggaaattcattctatttgatcttcaacctggtgtgtgggttcgctcggaataaaggcgaactactcgcttctcgtctgctcagtggcgttggaggcgcgggtggacttgttgtgagtatgcccctcttctgcgactagattttgttctaatgcgccaaatataggtgggcgcgggtatcatcagtgactgcttttccaaagaagagcgcggctgggtcattgctatctacaatctcgggcctgtctttggaccttctctgggagctgtcattggtggatttactactcaatacacgacatggcgctggacgttctgggcgacatctatcttcgacggggctttgatcgtggttggtttgcttgttatggaggagacatatccacctgtcatcctcgcgaagagaaaggcgaagatgctgaaaacggccgtgacaaacactcctctattgaagacaccttatgagaaaccagaccagagtctcggccagttataccgcaactctcttctccgacccctgcagctcctcagagtccagcccatcgtccagatcctagccatcttctacgcctatctatacggtctaatgtacttggtactctcgaccttcacaactctttgggaagagaaataccaccagcccgtcggtccagctagtctaaactacctcgcgctgggaatcggatatttgcttggttcacagatatgcggatttcttgcggacccaatctacagagccctgaagaagaagcatggcggaaatggcaaaccagaatttagagcagttctcatgttccctgcctcgattctcgccccggtcggtctgctgtggtacggatggggagcgcaggcggtcacgcattggattgtgcctgatcttggaatcgggctgtttgcctgcgctgcgatgattctgttccaatgtaccagtgcatatctgtatgaagcttttactttgtatgcggctagtgcgacgggtgctgtttacattcttcgtggattgacggggtttggatttcctcttttcggaccgaggatgtatcagtcgttgggttatgggtggggttctactatgcttgctcttgttgctattattatgggatgtccggtgcctgttgttctctggaggtatggtgagcgacttagagctcggagtagttatgctattgggtaaagtatggatgactcaaaagcaataattcacttgactttccacgcattatggaagtaggatgacttcataaaacgggcgcaacgcatgaagctaacatcaagctatgtaacctcggttcaattctcctccgcattaccgggggtatagctttccccccagctttggacttggattctctaaccttccaactatcgattgcaacgatttgcaatgtctgataactacggcagctaccaaacggaaatctacggcaagggtgccttaatgagcatcatgcccggtgtaacaaccgaccccaacaagctagaggggcaagctcgacaatttctgggcgttcgcgcattcaattatgtcgctggcggcgcaggcgagaaagcgacgatggacagcaaccggctggcattccggcagtggaagctgtaggttcgtagatgtttattacagtattcgaacactaacggatgagatcgatagaatcccacggatgatgcgaaatgtgagttgcggcaatctacaataaactactattacgttctcgctaacgggtgacatacccagacaccggagcaagacgtctcggtcgagctcttcggtcagaaatacgataatcccattattgtagccccggtcggcgtacaaggtattttccacgaagacaaggagacaggccttgcagaagtatgcgaggaggtcggagtgccatatacgatgagcacggcaagcacgagctcgattgaagatgttgcgaccgccaacaaggacgggaagcgatggtatcagctgtactggccgaaggataatgatattacgctgtcgctgctaaagcgggcgaaggagaacgggttctcggttcttgtggttaccttggatacctggtcgctggcgtggcgaccggcggatttggataacgcctatgtgccctttatcaagggggtggggaaccaggttgggttcagcgatcctgttttccgcgcaaagttcgagaaagaaactggatcgaaggttgaagaggatatcattggtgcttcgcgcgcgtggatcggtgatattttcgctgggagtccgcattcgtgggaggatttggctttcttgcagaagaattgggatggaccgattgtgttgaagggaattcagcacgtggaggacgcgaaactagcgctgaaatatgggtgtgatggcattgtggtatcaaatcatggtggtaagtcccttgattagctttttacatgttcttcctctgaacttttgtccaggccgtcaagtggatggtgctatcgggtctctggacgttcttccagagatagtcgatgcagtcggggacaagatgacggtacttttcgactccgggattcggacaggttcggatgtgattaaggcactgtgcttaggagccaaagcagttctcgttggtcgaccggtgatttacggactgagcattcagggccgagacggggctagacaggtgctaaagggtcttttggctgatttgtggcagaacatgggcctatcgggtattcggagggtgaaagattgcgaccggagtcagattcgcaaggtgcaatacggagaggtgaaagcgatgatgtagagggaatcagacctggaacgtgtatagaaatcttggacgtcgatcacatgtgaagggcccatcctcgaatctcgattgttggggtaccaactggcttacgcctacacggacagccttgaaaggccactgtaaatgtaaaatttccatggcttgaatattctcattcttgatatgtttacaaaatccaatgaccggggaaaacctgatatcgagacgaacctcgactatgcgcacgctcacattccagcctcaggatcaactctgctcccgcgaccagtcgcgtcgttgatatctttgattacacaatcaacctcgctatcgttgcgactaggtacattctttggcggggtagccctggatggcgcgcgagctacgactttgaccagcttagaactaagccgggctttggtcgaggggatcttgacgagggcaggaagagatgtcgccattcgtagtggcgatgaacacggtaggacagaagccgagtctctcctcgagcgaagtgtatgttcctaaatcctccaaggctgtcgacttagtcttgactaacaccctcctagttggcgacgctccacacgaccgtgacctcggcatctttcttcgcggcggcgacatttcatttctcgtccaccaccttgtcttcggttgcaaatctctcgcaggcacttctgtctactctggatgccattcttgggtccaccgagtcttcgagggccattgcggccattatcacgctgattcggcgtgagtttagatccgttgagcccggcgcaagtactaccgagaatattggtgtcggagacctcctcattggctccctaggcttcgcgctattgcagcgttggggcagaaagaataccgaaagacatctccggcagaatggcggggatgaaattgtttgggatgttgtcatcctagacaacggcgcacgagcagacgtgatcggatcccatcagctgcaattccccgagcgcaataatgaagagctggtagagcctgacagtgcttcctttgtgatgcctggaaatggcgagaaagcatttgatgtaattcgacggtcgagcgtgtctgattcggttggacatcgtctctctattccgttgggtggccagcagcaagtgtccgacgaggatattcgcgcttatattatgagccaacttcctcagggctgtcacgcatctatcaagtcggaaactctgacggcgcgaactatcacagtcgatatctacgatgataatatggcagagattgccgccccgcctggaacgaaactgatagaggagagattccaccatgatcatgattatgaggataccaatacgtccgatcgtcagcgacggtgtcccaagcatacagtggtgtttaggacagccttcaacaaatcccagagcactcaactgcgatcccacgacggctctggaaattttgccctacctgagtctgatcatcataaacgagcattgccgggaagctcattgactaatagtccaatgaagtctcatcatggtccgtcacgttcccatctggataccacgcagagcattgcccccaagccgcgtgggacaactcccgccttgccgaatgaacatcccaagcctgcacttactaaaggctcattcgcgaaatttgcacaaaaggttaagccagctgttcttgaaaaaaatgaggccaaacggccacagggaaagaagccatctatagactcatctgcgccctcgggcattccaagtcttcgtctacctcctaagcctacaaaaggaacagcgtctgtgaaggaagcgacggcgcgagaggtctctagcagacctgatctcaagaagagacaaactgaacctctgaactatcgaccgacaacccctgtcccgaaccggggtttacgaaggtcccccttcccaaactccccccaaagacaatcgtcagagtcgccaacgaaacacgccctatctcacgaaatgcacgcctctggaggctcacgagggggccattttacggtgcgagagaacagccacgagtcgctcctcactcaaaccgacacatttctttcacgccgtagtgctggtatgcgttctggatcgcctgccgcggtccagactcacgttcgcagcagcagctctatgtccataacaagatcagaagcagacgggactttatctgcgaatgataaccgccccggatcgtcagctatgcaccgcagatcccaatcatacacccccagcctgtactccctagcgactgcagggtctgagacgtcactgctgcttgcgcaccggcctcgcaaaagtgcatatgaagacatgaaaaccatacaggcactcaatcgcgatggctttgttccaggtatatttccagagagacacttcgtgcaaaacattcgccggttctcccggttctcctctgcttcatacggctcgaatgcgctcacggtcatgggtgttcctagtggctcgaagaatatacctagtaccaagtcagacagccacaagcatagtgcattctcagagaatgcaggccttccaccctctacgatcctcctatcttcattcgtcgatccagccggtggctcgaatgcagctggtgagacagagacaggcttcccattggtccactatctttctatcgaccatgactccaaagccgtggttctgactttacgaggaacatggggcttcgaggacatcctcacagacatgacctgcgattacgatgacctcgaatggcagggtaaaagctggaaggtgcataaaggcatgcacagctcagccaagcggctcctagagggtggcggtggccgagtcatgatcaccctccgtgcggcactagaagaattccaagattacggtatagttctatgcgggcactcgctcggtggaggagttgcagcccttctcgcaacgatgatttcagaacccaacccctccacaacaggcacatccttcgtaacagcctcataccaacccgctgcccgtccccgcttcttgactgccgatagtaatcccagcatcccgaaccccagcctaccaacctacaccatcccagcaaaccggccaatccatgtctatgcctatggtcccccagccgtgatgtcccccttcctccggcttgccacgcgaggcctaataacaacaatcgtcaatggctccgacatagtccccagcctgtcgctaggcatcctgcacgacatgcacacagcgtcactgtccttcaaagacgatgccacaggcgccaaagcgcacatccgccaacgggtcagcgattccctccgccaaagcatcatacacaaattctacgtcaaccagcctccgctggtcgtcaacgcgggcgatggcgtgggtgaagacgcttgggcttggaaaacgctaaaactactccgggatgagatgcgtgcgccgaaactcatgccgcccggtgaggtttttgtcgttgagacgatgcgagttctgcagcgggatgcgtttacggcgccggagctcggcgtcgatgggtatccgcgtcttgggaggcctgcgactcgcgtgcagattcggtttattcgagatgttgatgcttggtttggtgagttgcgctttgctggtggcatgttgagtgatcataatcctgctcggtatgagactagtcttgctgcgttggtgaggggagttttggatgagtagagcttgaggattctagtatccatgggtttttatgttctattctcatttgggttgatggaaagttggatgttggtcagatatattctcctctttctttggttatttgggattataaggttatgttggtaatgatttgatgatatatagggcatagatagacaagaatgaccatttataagttaacaattaacaattaccttggaattgtgaggctcagccattcttcctgatttgagtagtagccgtcttaccatcccaccattatcatacctagaaaggtatgggggcggtaagacgcagttgatggaccatcgatttatggttaacaaagaacaatgctgtaggcactatgaaagcagctacaggagagaatataagagagaaaatagggaaagaaaagtagttttgatcatagaatatacattgagaatcgtaagtttatagtgtatagaaccgacccatctaaaccaaatgggaatccgataaatagaatcaagaccaagatccagggtatcacggcatcactcgcaacgccaaacaaaagaaatccccacctaacaaaagaaaaaacaccctccaaaaaaagtaaacatgacaaagaatcagaagaatacagagagcaaatccacaaccacttatacaacaagcgcagtaggggcaggaggagggcccgggcgaccagagtggcagccacgctcgtggcgcttcatattgctgcggacagagaaagccttaccgcagccggcgtgtgtgcagcggaagggcttctcgccagtgtgagagtgggagtgaatgcgcagggaagaagggcgcgagaaagccttgtggcaggtacggcagatataccggtcgtggttctgctggtacggggctgaggtggagggcgggaagtagtggtggtgttgccaagccggggtgacgggggagatgagagccgaagacgagtgcgagtgcgagtgctgcgtctggacagtgggcatctggggggctgatactggcgtcgagggctggaaagaggatgtggttggcgggcgggggtagtacattggctgttgaggagcgtcgattggagatgtgtacgatgaaacgcttggcgctggcgaggcgtaaggtgctgtgttgcgcgggatgtggattgagccgttgctagagatagaggaacggtgtaggtgatggtggtacgcttccttgtgagagagcgactctataggagatgcgcgacggtgagcgtgaccagagccggggcgcagaggcggtgttgggggcagctcatatgactggacccggacgtgacggtcaccaagagatggtgagagacgctggcgctctggaaggtatattgattagcgaatgtgctttgaaattgtagtatcgttgaaagtactcactagctgcgtgctgggcaccatcagcaccctcaaagagagatgagattgaaggcaatgagaccttacgctcttcggccggtggcgacattggcggcgagcgcttatagtagctagactcgagaggagtatagatcggcttgacggccgtgctgtgggagaggaggttggcgagatccatgatgaagaagacttgtttgagaagtttgatccggctgcgtttcaaggttggctttattcagtgagtgggggatgccacgaggtttataccagaaagcaggcggacggcttaagatgatcgccagcggacgatgccgactcaggcaaaattccgatttacgttacggcatttttaaattctttttaattctgggattttcataattgtatttccctttattaattctttttcgatgtggtctgctccaaagcttaatttaattgattttatttcttcattatggagtaagtttaataaaaggcatttaaaattcatttaagcgagataaacaattaaaaataattcttttcggagattaacgtgggggggaatgacgatccacccacgcgaaggcagaacccctaaccttccagccttgtgggatgtgcagcgccctaaacccaaattgggaggccgtaaagaccccgttggaggattgcacctcggcttcggttagtgcagatcctgctcgacctgtcacacatcccaagccaccccataaacggctgatcgatcagggatctgttgatctgcgagagcgatgaacggttgtatacagagtagacattgataatagccattctcggtgttttgatctttgaactgggataataaatcataagataggtgccaaacccggggatgacacggttcaggagatcattttctcgcgtggctatggagaaaaacggcgcgagcgaaaagggaaggtcacagagggatagcactagtccattttgggccacatctccggaaccttggaatcatagttacgcctgcgctgcttatacgctggtcaggctactccatacatgatatccatggattgactatgcccggcgtaccggtacggagtactgtagatttaatttaatatattaattaccatctcagctgtgtgatcaccaagggcggctctaagcgctgggggcgagagagaggaatgcctgaaacagttgcacaatccatggccctgggctcgcttacacaaaccttacaggcacagtgagcggagtacatacattgaagtatgtatgtatatgagaaaacttgtttccttcccactctggtgcatgatacatagttagttatagttacaataacccatttagtaattcactctctagtcttggtccaataatggatatatggttggagaatcgaaaatggaaagatcacatcagcaattgaagacctcatacgggaatactccgcctagagtcgaccatgctcctgaagatcattcctcgaagccatggaactgaatcatggctaccagcgaaaacgagttattgacacgatcggcgttctggaacattactcctattaccatgttacctgtgatcatttctagccgtgcacggtttctgcataggagcgattgaggattggccgttagggggtggattcgtcccggcctcgtggaagcgacctccactatttagccttttacagagagcgagatcgccggtgaccgaggtacataataaatatccattacaatacagactgtacaaaataaagcagggaatatagattatacatacgtgtatccattcttattcatcctttccgtctacattccgtatctcacttggcaatccacttaggcaatagcatgcttatatgtgtatctatttattgatcatgtactattctagaatggctcgagcgttaggatcgtcccgggcctacggatgatcaacccccttgtcggcacttggtacggatcgcctattctcaaatgagcctggcgccggtctttgtattccgcgggcattgattgggtcacccttggttcggctcagggtaaatggatatttgacctttcctattcagctgtcaaaaagtcatgtaaatcatagttgggagcgtgccatatatcaatatagggaatacacttctagagctcctcctgagaaacttgacgcgccgacggctttttttgcttttggtgctttttctttttggtcatgaaaccgggaaaagtgtgatccgctcaagtcccatgggagcgattttacgctttgcgcttacgtttggttttgttgattgggttatttttccccctcttctaatgcctctactccgtggggagtactatatcctactatatttatcacgactccgtgcacattctatttttccaacaatcgatagtctggtcaatctcaccgaaagatatcatgttgagggtgatcgagctatcctctttaggtcatagacccgggtaggtagcggattcagccgtgatcgctgatcgtttcttgatcccggggcactgggcccatgccacgcgactgtctcacccctttctttcgggacacacaggcttgtccgggtcgagttaatggtcgcaaatcagtggggctgaacatgtccacgcgaggaacttggatctttgcagatgtgatatcttgtattcatgctcttcacgagttatacgttcaatttgtccactacaaggtactggttgccttgcgaaagggttgacacatggcacttgcatatccatgcgccttttatgtctgctgtatcacatatcacatcgtgtagtgtttcatcgagggaaatccaaaactataattaagattaaatccctccaagcgtcaaccttgacggagttctcaaagtttaagaaagtggtctcaatcttctttcgaacgtatgttctaaaattgtcgtgaattaccccaaatccccttggatgccgaggtcactagaaattctaaactgccaagcctgctacacgccgatctgggattggtagatccgatctcacgcttgtactacttgggaaggtgcctctattggacggtggacgcgccttggcaatgcaagtgccacgcatacaataccttttttttctttttcttctttcctccatttctccatttcacgtggcaacaagccctaatctggcattcagtccgatgcacctgtctgcgtccgatcactaggatatccgcatgggatcttcccgcgacgaagactgcagtagtgcacggagtacatattatatgctatttatgcaggtattggattattgaatcataatccgaacgtgtcgaacgacacacttttcacctttatattcatttccaactggataatatcaatctgcaatcattgcatatatacagcatagaaatatactttgtactactccgtatatagtaagtatatcaacaacataactactccgtaggtagaatacaatatacaatcctgccaactagtatggaataacctccttcctattccgaaacgatcggtggatcaacgaagatcccaactctagggggatacataaccgatggtcatagctcccgctgactcatttcatgatcgcccgccatctctaagcgacgaccgtttagggagtgtctccgatgcggtcctctacgtaataatatgtcgatacatattgttatgcggtgactcgtatttggctcctcagtgctcatgcaacgtactgtggtactaagcacggagtacggagtagatttagattagatacgtacctgatctgatgatgtctgggtcaattcgccatgaactggatttccacgctacggagtaatattttcgatggatgacaccttcgtccgatacctcgacggtgtttgttcatttttcagccccccaaaaaagggaacagcctttctacaccgtagattgtcataagcgtatgaccagccgcacccgaacccgaacactgaaaatcagggggaagaagtaataatagaatgtcaatgctaaaaagcaaaaacgaagaccctgagttacctataatcggatgccaaacgagggatgatcgacagcgatcacctataatatacggagtacatattgaccgtctcaaaagaggcagatccagcgaaagggggcgtgtcgcttccacagagtcgggcctgtgaaaaacaccgaataagaaagcagggctacggtacaatcctaccgaaatctgctagtcccagctaggtggacggagtgtagccggaacgagtgttaggcgagggacggttagaacccggtatgtctgaactgtatgaaacaacgacctgttcgtcgtggccgatcataaaaatctagcgagattaccggcgtcttaccggggtaccatttcccgcctcggtacaatccccgtgtaggatcggccgtggggccatcgggctacactcctcatgttgtctaggcgaactgaccatgtcgtaggttccataattttgcctccaaaaaaaaccccccgagaacatggaggtgatacccgacctatcgtcatagttgtagatcctacggagttgtgctcctgtttatttcccctttcgcgcccgttctcagcgcatcggtagatcgggaccactttgaccccctccgtgtctctgctacggtcctatatagttactagtatgtatctggatatctgcgatctgcactccgttcgctccactggagctatgaaacacctgatcaacttccctgcgctagacccatcagccatatccgaatgaagccatacacccgcgcatagtcttcggaattgtctgatagttcttgatagtcgcttttatgaacgacatatctattgcttcggtacggagtattcacctatattgtactgagtacggagtactccgtacaacatacatcgatggacggagtgcatactccatggcctgcaaaagaataaagttcatctttgattactttgattaaggtcctgcctatttcggcatccaacttccaagtcttccttttatttagctttctgtttttccactctgatccgtcgggtttggtttcgggtctttgttcggaaggattcattgtcgcaaccgttgagatcagattccaacccggtgactcaagattatgtgattactcgggatccactcgccgaggattgcttacacattaccaaccacacaccgagcacactacgtatgcaagtacggagtatgcaagcaactaattcggacatactccgtaatccataacagcggggaggagtggacacgagtctgatcatgcccagccttccgtattccaggcacacgacgatagtgacatatacatacgagaccaatgcccgttgtattgatcgcttactgggatgcaatgccactgtaatgccattgaaacaagaattcagcgcctacattacctttgcatggtgcatacttgtaactaactagtcatatagagtttgttactatttggtcgcatagaaggcaatcccctaataatcctctgtcggagaggcaatttcagtgtgaaccttgtacaacatagaacgtacgttgcacgttgtaatggtgtgcacgctaatggtagatcctgggtgatcgaccgtgtgattttcacggtcctgttgtttcatgtcggcaattgcttcttcatgtgcggggattgggtaggaaaggcgtatgcgttgagctcattattatgaaagcattaccccgtacgccattggattggtagagatgtctttcggttactataatggtactccgtagattatactaccgttgcattctaggcttttacttcgggggggtgggcgcctgggacctgctggcttatagatccttgtacctactagttcacctcgccacaccgtggtccgttgggtccacatatgcatttaggtggcatgtattattggataaaggatggcttgggtcccgtcttcttggtattggttatcctgcgccgcattacaggcggatcggagtcctgctcaagtaggacaagtacgagtggaaagggtttgcttcgtacatcctctattattatatgtagtcacaaggtacaaggtacatgctctcaataataagtgcaggctgcataagcagtctgcaatgatatacaaccattcaagtcaccaggccgcccagatctgaatatgccgggtgtggccgagattgtgtgacgcttgaacactggctctcgtgacatattacattgacaatatatgggctattcaactaggttgcggtgtttctttgtcttcgaccccaacggagtactccggtactccgtggtgagacctcaagccacgttattgggggccgttgaaaaggatcaagcagcagagtgaccaatgcgctgatctgagtctgcggaccgtgcatggctcccagcgctatgatgcatcacttggcttagtattgaaacatgacgtatcgtctttgtaggtaagaagaagagaagtgacttcactacggagtagataggggtttccaaccttcaagttggaatagaaataagaggttcgttttgcgaggtggggaaatgtccgcaagtgatcccaactaggtaaagagaaagagaggatataatacacatacaaatatcaagagcgtctttacaatgcatcgtagaatatcgagccaacggaccaaaaagcagcgtcgatcagccccgtgcggtatatgcatggccatctcgataggggatgggctagagatgagacaagaagagtacagttgaaatcaaaggagacaaagagcaaattagagttgatcttagcgaaaaggatgttaatgccgacaggtcattggtgtgcaatcctccggtgatcgaccgaaatgtcgatctgagctctcttctttactgcaagcgatctatttctctttcggtcgaatggtccgatccgagcatgagaatgcttttcgaactttctaggccaaggaagaaccaagagaaaatcgtaaacggttgtatttgacccctttggccttggagcaagttcgtcctttactgcggctcccttttggccccgtatgcatgatcggccactccgtgtctgtgcgagtgcttggtccacgtctgtttccaggatctttagtctgatcgtcatatcttctgacatttcgtcgagcacaatatgctgatagagtataaaaccattgctcgtggttacatcgaaaatatgctccttgttcttagaaattagaaatctacatactctggacaatagagcccttccgaggttcgaccgacagattggctaaatggggtaataggataaattggtaaattggtaaattgggtatcgcaaactgagcataaactaaaaacctcaagaacttcgttaggcatagacgtccacttgaccattgctttgcatgggttcagatgggccactggtgatcgctctggcggccaccttcctcatgttctcaattgccttcttgaagttggccttgtcataatcttcgggcatatgctctccactatagatgcaaagcacgcgcatacccggcttgtaagagagttgttcaagcagcttaggtgtaatgaggaagtactggccgcccccgccaccgccgatggggttgccgccttcgtcggtttcttcggtttcgtccgaggcacaggcaatgtccaccaggcgtccgtgaaccatgcgctcgtttcgcgggtccataccttgattgatctcatccacaacgcggaatggcgaggcggagagcgactgcagtgccatgagatagaagatggtactcaccgctcgttcaccaccggactggcgatgtgaatccaagactgacagccccgcgccctgacggaactggacgtgaatcacgatcgaccactccccgaattcgctagcaccaggctcgccattgggcccagcttcaccttccgctttgcccaaggtgacctggccagcacatccaatgcggcggaaagaatccgagaaggcatcgctaatcttctcgatgagcgcttccaacctaggctcccagtccttgcggatgtccgtgatggcgttgtcaatttccgtaagcttgttcatgaaatcggcgagtttggagcgcaacttctcaatggattttccacggtcttcgaattctttgatcatctggctactaccaccatgggtgagttctagtcgggccttctcagagtcaatgtcggcttcgagcttatctatgtcatgatcgttgagttcttcaagtagagattgcgcgtcgggttggtcgtgcagttctcggctgatttgctgagctttttggaaaactgctctggccttcactttggattcccttaatttgactgtagcctcctgcgcctgtcgtctctttgtttctagtaacttcgtactatcaatgttgcgatgccgcagggtctgaaggtcggaagttgcctccaggaataggacctcgactttcatgagctcctcatgagcttgacggaacaattcgacagcatcctgcattccgtcagatacggtagatagaaatgtcagtgatgaacttacggcatattcgacagcgacctcggccttttgaattgccaattcgtcttgctggttgcgaaattcacgaactctctcccgtaccccatcaaacatggctgtaatgttttggagtttggcctcttgttgagctgcaagcagttagacaaatcccagacggcagaagaacaagaaacgaaacatacagattttctctgggattgctcggtactgagtgtgagccgtctgttttgcgctcttttctttctcgatgtctgtctgtagtacgattagtatatcgtgtgacgaaaacaagaggactatgcggaataccatttctcgctcggtctgctcgtgttcttcgcttatttttttcacggcagccctttcggactcgagcttctccttgatgtcctgcagctgttcattccataacgtgatgttctcttggtgttcacgtttaagggaaacatcaacaggctgttcggtccacacctgagcaggcttgatctctcgaacccgagttgatgtggcaccaggtccatactctctacgccgagtcacttgatagctttttttcccagatacccaggagctcattgaaccctcctccaagcgggcaaaaacttcatttgaaatttcacgcagtccgataggagtcaagtgtaggctcttctcactgcacagcatggcaatgacaggatcgggcccgaccagaaaatcccttgcccaaccatcgaatcccaattgggcaagttgatcattcgtcattggaggcctcatagtatccaacgacagcgagcaggtgcggatgctaatgtcatggagtcccaatgtttggttaatcgcaaattgcaaggtgcgaaaatcattcctggtctgtacggtgaacgacgtgaagtctgtcttctggaataaagactcgacagcatcggcaaatttggggtcggtgattgagcacgtaacgattggagggccgaagacttctttttcaaacttgctttggttttcaagaagccatctataggctttcaacgtatcgttggaagatttctgcaacttgagttcttgttggccggaggctgaatccaagctgcttagctggagttcggcctgcttgatactcctttgcacttgctgttgctgctcctggagtggctgtctcctatcttggatttctctggcctttgcctcaagctcgcgtttttcgcgccgtttctctctctaatgttgtgataagtatgctggtccaaatcggaagacatagggttcttaccaaggtctcgttgtagaattccgggtcgaactccacggcctcctcttcttgttggcgtcgaagtctatggatagcttgctgagcagatgctgcttcggacttgtgcctctgaccactctttttttcggcctcaatccgacctttgagatccttcatcctattctcaaattcatcgattttttggccgcgttgagtggcgaccctagatgcctcgtcaacagaatcctttcgatcatctttcacaacgttcaatcgtgcgatataggcctctttggcgttgactgcacgcaagataggctcgttttctgcctgaatccgatgatattcacgctcagctacagctttggtaaccttcagggcctcgacagcattgtggtgttccttgtactcgacaattggacggcaacgctcaaggatttcgattttccgcttgatcacagctctctgacgcattctttcaacgtcggctctctgcatctcttggcgattctccatattttctagcaattccttgtcaccactgttgtccatctcgagtttcttctgctcagctctcagtctcttcaaggcatcatgccattgggtcatttccggaccagctgctgctcgttgcgtggaatgaagaagctcaatcggtgtaagtgcagcaaactcggcgactttatcctgaggaagaaactggcagagattgtctacctggatggcgaaggactgagccagtttcaacacatcgttcttggaagcgggtgctccgttgagtgtaaatgagcttttattgccatcgcgcttgatgagtcgctggatgacagggttgtgaccaatcttgggcggtccgcatagttcaatctcaatcgtagcctctcgggccccatgcttcacaaactcgcctagttccttggcgcgtccaaggtgctaaagatcaggtgagtatcagtatagggaggctgtgcagtattatagtccgggtcttacctgaggtccccaccccaggcctaagcagatggcacagaccagggtgcttttgcccgttccatttggaccaatgaccatgttgagctttggtccaggataaaacactgctgatgtataagtcacaaagtttgtcaccttaatccgcacgatcgcgcccggcttataaccaccgggaccaagaccatcgtgggctgtcgcacgcgggacctgagaaactgcttccggtatttcagatccagcactatccccatccctctctcgttccccttcgccttcgctctcgtctccagagtctgatccgctatcgctttcagcaaggtccaagcggggacgtttgttgttcgagggttgggcttggggagtaaacgtaaagtcttcgtcttcttcatcctcactgtgaggtcgacgacgaggaatactgggtgatgccatgcttgttggaaccctcaaatagatgtagagggagcctcatgggctgtctgtgaaattcgctttgtctggctgttctttgttcaagtccgacgcgaggaacgcgtccgcgatcaataaagtccgattagtaggcggtgagagcctcgaaatggccaattggttgcagccaaaacagcttcgactttgtatagcactcaccatgcctcctccgaatatcaagcggttgatcttaactactgcagttgtttctatcactatcacgggtactctttatggcgctggtctcaaaactgatcaagaaattgctgaggtatgagcgaatccgcctagatcgaatttatccatttacctgcagcatttcagatctaacaatgatgcgacatagacagtaaagcaacgacaacaatcgacgtttgatgagcaaaccaaagctctccagaatatgcgctccaacctgattgctcggagaggcataattgagaaccagatacgagacctggatgcaaggatgctagagaagcagcagaaaggcatcagtggtgatgctcaagatcaaccgagtggaggtcgatgagcctatgaagtaattgcccaacggaggcaacggattcacaactaccgttcaacgcgaaccaacccacgatgcaaccggcatgctttgagtctccgaaggaccgggcaccacttgcgattcaaatacaaggtggcggctatcgactacatagttccaacataggtcttaacacccactagctgcgcagcaaactttctactaggcctgttgcacttgtttttgatcttcgagtcccacaatccaaccatggcctgcaaagtctggaaacattggacttgcttcgattgatggatttgactgcttgtacataacttggggtgctattcaaatcaactattacttcttttgtttataaacaagaatatatattttttcctctggcccgaagtgctaaagattctactagagggctggatgtatatttagcatctttcatttcccagacactgtagctttaatctctaatccagagcccctggatatgtaaaccggcctggaagccacttgaatagtgcgatgaaatcaggagacgccgttggtcgactaatttggaagctagtggcgagaccccagacgcctaagcctcgaggttgagtctttccagcaaatcatccagcttttcgagcaagatctcatagttcatcgcatcttccgagaattcatcctcaacaaccgcgccgtcgagagttcgaatctccggggcatggacttgtagctgctggccttgattggggatagcctccttggaaacattcagggtctgtacaccttctgtaagatctaaaatatcttccagcggctcgtcttcgtctagatcttccggtacttctttttcttccatcatctcattcagaccagcctcaccaaatctcaatctaaaccgctctccaagatagaaccggatatcatccagcatttcaatggaatcggtttcctgtctcgccttgatacgagatgctgattcctggatcaactccgcaaattctggcctatctatatgggcttccagtcgatatgcgagatatcgagcagcgaactcttccaatctctgcacgcgcgtcaaccacgccgctcgaacgattaagtaaatgtcaatgtcatcttcttccgcgcctcctcgagttttcgcagcctccgcctgggacatcccagcactaccgagggtgctgatgaccatggcggctttcgtcttcagcttctcaatgaagagcatgtctgcggcgaataggacgtcgacagcgatttctaaggggaaatcggctctttcggtgtataggaatgtaagaataatttccaagacttcaggcgaacagttgacgtcgatgatcgtcagatgctcattgaggtaagcttcgcgaaaagtggatgtaaacattgcctggaaaaactcagaccgcaaaagcattgctcgatggcatgggaagatgatcgatttcggcgcctcgaggttgttctcattcgcggtagagatagcgccaatagcaatcgaactggatgtgccatttctgacctctgatgtgtcaatgtcctcttcctcctcatcatcggggagttcatccgctctcagaagaacatcagcgaagattgcattgcttcgatcccacttcacttcatccaccttcgaagtctccacctcgagcttgttccccagaatattctcctggaaccattgttccatttgatctcggcccttggaaatatcgtcggttcttctttgtctagcacgtcttctgtctccactatcaaggatactgtctagaagactaggtatctccaaatacttggaaattctatccagcgctgcaaaagtctcggactccatgaagcctgtccctggtccacttcgcaagtcccgaggagcttctccaaagtacagatatttgatagccgcaccgaatgcctccggtgaaatggtgctggggagattccatgttgcagattctggtgccacggccagtttaccatggaagtatggagagcgtgccgcgaggatgaatttgtggaggtggagcgattcgtcggatgccgtcacaacaatatctgttgttaatggagattcacgggtaagaagtgtagttatatgcgcggctagcggctggagggggtccgtggacttggaataatcatattccagaaggagatttcgtatccggtcgtttaaagcattatagagacatctatagaaccaccattgttaattctagccacttcatagagaatcaattgctatttacctctcaccctgaaatgtgtctcgctcacaaagtgcaccagactcgagaagaagttgcgcaacctcataatgaccacagagactcgcctaccaggttcattgattattatgcgatacacgggattggcacggtcaaattatcaatatattgtactcaccagaatcaatggcgtataatcatagggatcacgagcattaacattgacgccctcggtgattttctcctggcagactttcagatcgccctgacggcatgcgctgcatagttcacagaatggcgcactgagatctaaagggttatcatccttaatattgccctccttaatcaattccttctcattgactaagctgatctctagctggtccttccgcagcacagttggctcatccatcatgcagattgccaggaacaacaggtcgaagtgggatgaggccgagggcaaactgcaacggcgggggcggaaactggcttatcgataagaatcacgtgattgtacaactgtgaagtctgagattaagggggtgtcctatattgtagagatatttggaagagtaagtagtgactagaatggttaaagtatgaatcaatgtatatacatagatatagatattcaagtatacatcacaacaagaactgtaataatcataattggttaaacaccattcgcctccttccgaccgtttgatcgacctcccctaccgcctgctgggttggggaaagcgccataatcaccgttgcatagcaacgatcccccaaacacccgtcttcaaagctccaattcatattgccttgactcttcctcaaatcttcaactctacagctagacttttttttactaacacaggatcttgttttataccgttcatgcatcattgaccctcattcttctgtttcgccttcacctcaacgtcctaaaccaactctacagcaatctatagccatggcgattgctttggctgaggccgataagtatgagatcttggacaaaattggtaagttctacctttttgtgacctaatttgtatcctacgtgctcaaaactaatctcatattcattcaggttgcggttccttcggaatcattcgcaaagtcaagcggaagtcagatggatttgtaagtgtgcatagttggcgtgttgcaaccagaactaacctcaaattgctcctatagattctttgccgcaaggaaatcaactacatcaaaatgtctcagaaagaacgcgaacaactcactgccgagttcaacattttgagttcccttcgtcacccaaacatcgtcgcatactaccaccgggaacatctcaaggccagccaggatctgtacctttacatggaatattgtggtggcggagatctaggcatggtcatcaagaacttgaagaaggccaacaaatacgccgaagaggagtttgtctggcgcattctctcccagcttgtcactgctttattccggtgtcactacggatctgatcccgccgaggtcggatcaaatattctgggcccggctcccaagccatctggactcaagggaaaacaggggcaagtcactattttacatcgcgacctgaagccggagaacatcttcctcggtagcgacaacaccgtcaagcttggagatttcggcttgtccaaacaaatgcaatcccacgacttcgcatcgacttatgttggcacacctttctacatgtcaccggaaatctgcgcagctgaaaaatacaccctgcgctccgacatttgggcggtcggctgcatcatgtacgagctgtgccagaaggaaccccctttcaacgctcgtacccacatccaactagttcaaaaaattcgcgagggaaagttcgcccccttgcctgattactattccccagagctcaagaacgttattggaagctgtctgcgggtcaatcccgatcaccgccctgacacatctgctctgattcaccttcctatcattcgcttgatgcgcaaggagaaagaggttgttgacctcggaaagaccctgcgccgacgtgaggaggttgctgtccataaagtccgtgaaatggaacagaacctcgccaagagagaatcagaaaagcaacacatcaaggctgaaatcgaaaatacggttcgacgagagtgggaggtcaaagcacgcttagaaatcgatcgccaggtgcaaagcgaacttgacagactccgcaagcgatttgagtctgaagtgcaagaaagggtcgccattgaggttaagaagtacaagcacaacacctccaatagcaatacctcccgggacgatgtgtttcgcacgagtaccaatggctctgggtcctctcgatccagcaatcaaggttggcggtcttctcggtcttctgccaacacgacagacgacagcgatactaccccctcatcaaacgccgacatcagccagctatctcttggctctcctccatcaaatacccgaaagcagcccaagaaggagacgcgaacacctttttgtcggtccaagaccgttgttgattcaccggtggatgttcaaatggccgagccgtcacctatttcaatcgcttcgctttccctatcccctcgccgcacttccgcccaaggaggcgctcgcaacatctttgcagaggccgagcggaccaaggctaagtgggagcccaccctagcctattctgatgatgatgacgacacccccgacttgccctcaccaactcggcctaaggtgaagcccgacccattgaaggcgccacgacgacctctacttcgccagaacaccgcggctctcatgcagaaacttagcacgcaaccttctctcttcccttccggcggtacccgtcttcctcaatcgacgagtgcatctgcttcccagtctgaggagcgcagtgtaagtgagagcagggctaggtctccccaccgccgtctaactaaaatcccatcatctgccaacctcgctgccgatgcgggtacctcaccaacccgcaagagtgcatcgaagcagcaacctccttctactaagaacgggggtggtggcgaagagatgttcaaggctgttatgcaacgcaacatgggtggccgtaccctcgtcgaactcgcacaggcgagagctggaggccgtccgatggatgaagtcaagcgttgtgccagtgactcgcgcgctggcggccccaccatgagcgtgaaatgctctgaacgtgatgctcctgctatctggaaccctgaactggatgagatgcccagtcccttccttgcccgtggcaggaaagttatccgcaacctgcggtagtcttttacttacattaaatctcctttacatttacactgttctttcggtttggttctggtttcggctctcttatgacgccttggggtattggagttttttttggattgaaggtttttctttcttggatttggatttcgatggtttggtttctttgctttggtttctttggtttctttggaagcccctttttgcccaccgttttcggttttcgcacttcgcttcttgcgcatactttcccattatgtcacggagttggcactaatgttttcggagcatccttgccatgcaaggcacggagtttgatacatatgcccatgtctctttgcattcgttggctacacacttgcctccccgactcgactctttaccacttttcttttgttgtttatgccgtcatgcccctttccttcaaaaaaggagacgattgagttctcttgtacatttattgcgttagccatgcatcgactgtcgaatttctgtacttgtttcctgtttctctgaacgtctcatctattactcgtggtgtcctcctccttcgcacacatgttgcttagtggttatattggactaatatttgctatgcctcccactcgggagtacttcacctaattcttcttcggaaagattacatattccgggttctggtgctttcgatgcttcaatgggggatgtacatatccatttcagaagaagtaaacatgtttcgtgtcattccagacttataacagccccgcagaagtttatgctgacttcctaaatgtgggagtcgagtcatccatctacagcgttagccctaccctaatatgcatcaccagtacactttaccactctttcaaactactagatgcatagaataggtaaatctgcacatctgattgaaatctgcaacataatacgtgaatgatgttcaatgaaacattttgaccaaaagatcagattaagcccacgcctcctcatcttcgatctcttctatctgaacagacttactctcctggttaagacgccgctcctcttcttctaacgccaacatccaatcctcctgtggtgaatcgccagcttgtgcttccggaacggggccggcatgatacccagccttctcaagcttgtccaactcttcaggttctaacaacttcccctgtcccttgattgactgctgtttcattctgaccgcagccggaacaaacttcctagttgcctcttgtcgcaggtcccgaatctgaggcttcgcttcgtaaacggtccttgctgctggaaccgccgttggacgagatggcagtgggtgaggaccactacgctcaacgttctgttctgaaggcacatttccatcccatctgcgctggtgctggcgtgggattggtggcggtgtatcccgcggcatgggtatccttcgcacgtcctcatccgtatcgctggtgtcactatcacgaggcattcgtgtttcatttgagcctcgccttctcttcccaagcacgccgtcaccaccaccccgtctagaactatcaccctggcggcctcctctgccgccgtgatcgaactggggtgccttgtcgccaagagcttcgcgcgccttcaaaacgccccgcaaatccttttctagcgcttcgagaagctccttatcgcgcggccgtagtttttgccctgattcctcggcttctttgaagctgttgatctgacgttgaattcgatctgggttgcggcgcgcaagtttctcgtttcggcgggctagtgcctctgatttgcctttcttcaactctttttgtttatcctgtttccgttgcgctgcggcagggttgatcgagcgctctttgtctttggccatgacgtcgtgttggtgttggtgtgtgagtggtctgtaattatcggtatggcgtaagctagctgcgcaagcgggtaataaatgccacggactcttggcgaatcaattgaagagatcgcagattaggtaccggcacaaacgtctgggctctgtggggtgtcgcacgtgaagggtatagttggaaacaagaatgcagggcgcagactagaaaagaaagcgcgcaatgaggatggccagtgtgtctatcccgcagaataacaggcgatcagtgcgttaggtcgcctcgtctagatcgatcgcgtcgggccgtcaggtcgatagtccgagactacaggtgggtgatgctcacaggccgaatgtaagaaaggctacgaacaagcggtgtgtcaaataaaatcaccagttttagcttcacggtttgagcagctaaggttggctgtgatagtagcggctgagtaaagaagttaaagttgaagttgggacttggtcaagtaccagtcctagataattttggcagaaatccaacatgcacagcggaaaagaaagcggtgtattttaggaccaatcatggaagttaaatctcatctggtcgctgtggttctccgtagagaaactaaagagtggagagagagagctaccatggttcagcattattgaactacgactacatacattgtacatacatcgtacattttacatctatgttgatttatatataatcaatgttatcattgcatatatagagatgtatatcattgcccattgctctcgattctcttatattcctggtgggcattaatgtacggagtagagcctcttgaaacttccatctcaatgagataggtgcagagcctatgcaatattcaatatcaaagaaaaaaaaaacatcgaagaagtacttgaggatgaaacaaaagaaaactctgaaaatatcaatacaataaatacataggctgctaaaaattactttttcttgatgttcgttccatctccaagcccctctttatggggaagtccgaggtatcatatttccgcctgagcctgtgctccaaaacatgcatatgtataaaagagaaatctcactagtctcttcgtcgggagtgtaactggcttccctcgagccgcgcgctgtctgttgagttgccgccaaccttccagcggctcacaccttctttctccgcctctctttttcctttttgatttctcctcataggagaaaaaagaagcttctctcccctcctcagccgtcaatagtcgcattccccggcctgactgcagtatatcgcaaactctcctctttacactctccatcctccatcatgacctgtggtccgtttggtctcacatcgagtttgatcggcgcctcgtagactgtcgcggtcggagcatgtctctgccgggaccaaatgtccgtctcagcctcgattcccgacacttcgcttggtctcacctcctccgagatccagatcctccgacagcagcagcagattgccttgcagggcggccatgccggcaatggggtggccaggggaagaggcactggaagaaccagcaattccagctcgcgcgcaaccagcgctgccagcagccagggtcgcttgctgctagaccctatgagcctccgcgcactatcgcaccagctggatggattgcaggcgcagatcagtcaccggatcgaatatgtatgtttcctcctcggtccttgaccgcatgtccatatcatcgggaaatcacatttcgttgttttaacataggacatccttgctagctcgaggatcaaatgcagcgctccatccaaaacacctacgaccgcgcgggaaacgtcattcgaaatgccgatgcggaaattgcccgcacccgtgaaatcttggcctctatcgacgagttggacaatgagctggcgaagatcgcccatatccgtgatattgtcaagtcattccgtggccggatcgagaatctagatcaccgcattgatcagagttctcggcgccgacgataatgccttcccataaacactctctccaaatacttccttcaaccccacctatcttgaagcgctccgaaagaccatgtacggtcctgcgctccgcacaactcacttttactcgaccactggatggtccgaccgatacacacctatattttcttcacacaagtatccgaaccagaacacatcaaagccgacagaacaagaaacaacagactatatatcgaatgtgtcctcatgaaccctttttttaatgcgcgtcaatcaccgtattcatatatatgtcacatttcattactctgggtatctgcttgatgaaacaattggctgaaagaactgcatgcctatgttgtagagacaccagtgttgagcaggcgacctcgaacggactgcagtatcttcatgactgcttgagctgcgtcgatgacggccatgagaactcggttcccacccggtgggaatccatgagatctgatgactatcatgaagggttttgaatgtgatttaaagcgcataagcacaacttgtcttatgcgtctccttgtttgatttgatgcttctgctatttcccctgttgcttcgattcccctctctgcatgttgcgtgtacattgctccgggttttctttttctgcgttgaggttggcccatgtccattgctaggatgattatagcttggcttgtggtgttctgcaatataattgggaacagtttcttcaaaacgattgaatcgtacgtcgctctgcgttgagtcctccaaggttgacatggacattgaaatgtcagggtctcgatttgaatagcaagcaggtcgtcggtgcagtcgctagagatatattgaggctactcaagggggttgagacttcttccggcgatgatggtggaaatcattgccctggtttgatggacatccctggcgatcgtagctgagatctcattgtaaaagccgacacaaagcaagttcgatgggctcctgcagagcgccttgatcatgtagttgatatagcaaaagggagcgcgctggcctgctgacacgcacaccttgaaagtgtggccgcattggtttcgggttttgtaggacagggtgtaagattcaatacattaaagtggcccacgcgttgaccccccacgcgtagtcactggatttggcgagtgctattcacgttattcagacaccgcagcatccaacattggcacattctgttcacataattcgactgctgctccttgcgacgacgcggaggtatctactttttgtgaattcacatcgcgtagcaaggccgagtccttctcctggcggcgttcaacgagctttttcccacgtttctccgtctgagggaatcgtttttctgtcccgcacaagaggcaccggacgaccagtacatcggcccatggcttcttgccgccacgacttgcgtttctgatttcatgcgagcaagtcacctccggcgtcaatattgtatcacagcgcttgcaaaccgatctcttcagtgtgaccggcaaccgaatctgcgtcttcattgccacggcgcgtagatgtgatacacatacccttgagaggtttcccaatagctcttgttgttgagtatctactgtgtggccattatcccctgagtcaacatgaccagcaacagaggtgtgttcattgttgtggactttgacgttctgacccttggcgagtgtagatttgctctggaaatatgcggcggcttggtgtaggtaatccagccgtgctcgaatatggctctgagtgttcttgaaattcttgacttccttctttcccttggctttagccattctcgaacattcaacagagcaacaagtggatctcaaaattgtgtgctgcaacctgcacttcgagaagagcttcccatcgacgctagacccaaagcggtgaggctgaataaccacgtgatgctcccttggtgaggtcttcgtcctaccgccttatgacttcttcccctacacctttgtctatcgagacctgccacattcccgcggtccatacgtcttctccttattacctttgtctactttcacttcaaccacacgtcatctctcactcgcaatactttttcctcttcttatcaaaactcgcctacttacgtcgccatgtctcacgaggaagatcttatcgactactctgatgaggagcttcagaccaccacagcaccggccaccactgctgcgcctgccgccacgaatggcgatgccgacaagcagggcgacttgactgtaaccggcggccgtcccgacaagaagggcagctatgtcggtattcactctaccggtttccgcgacttcctgctgaagggtgaacttctgcgcgccatcaccgactgcggcttcgaacatccatcggagggttagtctaactcattattcccacaagcgttcctccatttgtccaatctccaacgtccgtccatcctcgcgggaggaatcttctgtcggtatttggcaatcagtcgtgtttcgaatctgcaggcgacatgaggattattgctcctgaaaaaggacaatatgtctttacaatatatatacgtttggtcctgtggcgctcttgcgctaagcctgagcctatgttcccaactctcacgtacttcgtggagattggcgcacgcggtggaagactgtgatatttatcacgtttgcctccttgtgaggcgcacctcatgttgtctgcagaatatgataggatgtgcacaaaaagcctggcttttaagtgttacatatagtcatggtggtttgatcaagcggcggaagatgaccgcctgcatcaatttgatgttgtcgggggatggacggacattgcgagacgactatttttttttgcttcttctttcgtcgaacccaatctaacatcggctccgccttccaacagtccagcaagtttgcattccgacttccattttgaacgtcgatgttctttgccaggccaagtccggtctcggtaagaccgcagtcttcgttctcaccacccttcaccaattggagcccgttcctggcgagtgccagatcctggtcatgtgccatacccgtgaactcgcttatcagatcaagaacgagtacgcccgtttctctaagtacttgcccgacgttaagactgcggtgttctacggtggtaccccgatccagaaagatgtcgaaatcttgtccaacaaggaaacctaccccaacattgtggtcgccactcccggtcgtctgaatgcgctggtccgtgacaagaaattgtccctgcgcaacgtgaaggcctttgttctcgacgagtgtgacaagatgcttgaccagattggtatgtgcatgcgatatacgacttgactatcacatcttactaacattcttccccagacatgcgccgtgatgtccaggaaatcttccgtgcaacccccgccgacaagcaggtcatgatgttcagtgccaccctttcccaggagattcgtcccatctgcaagaagttcatgcgcaacccgctggaggtctatgtcgatgatgataccaagctcaccctccatggcttgcaacagtactacatcaagcttgacgagaaggagaagaatcgcaagctgaatgagcttttggacaacctcgagttcaaccaggtcatcatcttcgtcaagagcacccagcgtgccaacgagctggacaagctgttgcgcgagtgcaacttccccagtatcgcagtccactctggtgttagccaggaggagcggtaagttcatccgagttcggcattggctgcagcaatttgctgacctccatctagtatcaagcgctacaaggagttcaaggagttcaacaagcgcatctgtgttgccactgatgtcttcggccgtggtattgatatcgagcgcatcaacctcgccatcaactacgatctccccgccgacgctgactcttacctgcaccgtgttggtcgtgccggtcgcttcggtaccaagggtctttctatctccttcgtcagcagtgaggaggacgagaaggtcctgaaggagattgagaagcgctttgaggttgcccttccgtaagtttctccaattccaaactaaaatgctttttggcaaaaggctaattatatccacagcgagtaccccgaggcaggtgttgactccaccacctacatggcttaggcatgtctcggtaaaaactttgttgatttgaaatttcttttcctctttccaattgttatggcgcactagctcgggttttgatatgtttttctccgccgttgggcgctgcctctgccccccaccccttgtggctttgaagtgaggcataacccttccatgtatccgagaacagcaatggaagcaagaatgggttagctctgcacgactgtttaaccgtatcctggccgtatcctgacgggaattctgggatcacaatgtggagttgcgatgtcatagttatcgacgtctgcaagacaagtcaaagccgaagacaatcagatagaaatatgcgccgccctgcggtcgtgattccgaccagacgacccgaagaccctgctaagtttccgatcgagccggagtggatatagacaccagaattcaatatctcaactatgttcctcgtggtttgcccttaactgtcggaaccggtccacccataactctagggcgcaataattagcctccactataccatgtatctagaagctggatgtatgtagtcggtggttgcagttccaatctgacttaaagagcttcgtagcagctttggtcatcctttacccgatccttgtatgagcgatgtgattttgactgattcgacgcatcatactgatctgagcgagatatgtgtgctgtttaggatatctaccactcaaagtcaatacagcgagggtattcaatgctgcgacatatcagtatcttctggtcaaaattagaaaataaagagttcctgcatgctatcatgacaactgtcgagttgaacacacggcgaagaaattgggacattcgtgagtcgagtagcaagatacatataactaatatgaatgtagatagatcttagtagaattggcaaaactcgagattttctacatggaagtactcagtgctttgtatatatctctgcgagttagaagtaaacatacggttgaccgtccaacacagaaagtatcaagcataaccaaagcccatgacctggaatataatacagttacataatgcattaccctgtttgaggcgaaaatcaaagtgaaaacacgaaaaatggcttagcccaaagcactagcagctggaaaggcatcgggtagcgtatcaggaaaataaggcagagacatcaaaccctgtcccgaattttcaggtaaatggccgtcggccctctcacttcagcgtcggctgtttgtgagtgcagagtctgcgttcgcgtgatttgaatccgtaactaagcagatataatatagaaatgattgtactctgtactattacttagatcaagaccacgttgcgtaatacataataatttagctggcctcaatggattgacaatgcaaatcactgaatctgcaatgcatcaaggactgacgtgcccggaagtgcaaggaagagtcgggatggcatcaccgcatccgcgtctccgagcccggttcaaacacaacaaatgccatggcgtgatcaattccgtcagctcactacagagccctggagctccgagggaaatatctatgggccctacaacgtacggagtactcggtatgttgtacggagtactctatagttaagtaccagctaatactaagatactagtgattccaacacgttatataaagtagctctacatcgtctcctttccctaggatcattatggttaatatgcttgattaacggctacccccggggggggggggggggggttannnnnnnnnnnnnnnnnnnnnnnnnnnnnnnnnnnnnnnnnnnnnnnnnnnnnnnnnnnnnnnnnnnnnnnnnnnnnnnnnnnnnnnnnnnnnnnnnnnnnnnnnnnnnnnnnnnnnnnnnnnnnnnnnnnnnnnnnnnnnnnnnnnnnnnnnnnnnnnnnnnnnnnnnnnnnnnnnnnnnnnnnnnnnnnnnnnnnnnnnnnnnnnnnnnnnnnnnnnnnnnnnnnnnnnnnnnnnnnnnnnnnnnnnnnnnnnnnnnnnnnnnnnnnnnnnnnnnnnnnnnnnnnnnnnnccggggggggggggttggtatacgaagacaaatatttaggtttaaaaggacccgattgggtaaaaagggtactaaaccagctgctaagaagctatttttaattatctgcgatttaaaagttttaattcgtgcagaggggtatgctttgaggaagtcatctttattaatatggttgatcccagcctgtattttcattttaatcaaccggctgtacgaccgctttactaccgcaaaataaccgatattaagtggttataaaaggtgagataaatgcagtggtatataaattagtataatttcattttacttataaatcttatcgaattttagggttaaatggcttccgtgaccattgagtactagaagccgataccgatcctttaaccgcggaaaagtcgatagaataaagagcttttaaagctagcgaagtctaattttattagaagtccagccatttagactaactttaaaacgccagtcatttggaaggttattaaaccaagattctatatagaccttacctttgaaaataatatacagaaggagggcctaccccgccgcgtttatatattcaattgcagttacccactcgcaatttctgggttataaaagtgatctctgaccgtagtattcacttctagtaataacctttgccgttacggttaaacctattgcaaaaccggtctcgtcgaagttataaatattatctaggtcaattctaaattaaataatggttttttgaataagattaaaccattctccaataattttcgggtcttcatattttacacgttcgtaattatagtatcttgagaatcgggaggaaagaagaggataccatttaataaattctgtaacccagtttttaccaactgaaagagccggggtagatccacgttatttgaggagaagattcgccatttctcggaccatagaaggccggggggcccctccacgagaatctatagagattatccatttctcaagcgattcttcctcagtttctgtcaatttatgaccattggcgcgagtttcggcgcgaaaggggcccaatggactctcgcgtcatactacgatattggtcacggatgtgtcggccttgaggccctccgaagtagacggtcaactccttgggatcattccgcacgatgtcggtaatgcggaagccatagttatcggagaagtaggcatcagcataatcccagacctgctgtgccgctttgctttgggtatagagctgcatacccatgcccttttgttgactaccctgaccagtgaaaaggaatgccgtctcctcaggttcgatctcagcttctccacgcagaacggtctcgccgcgcccgacgtgctttgcctccactgagacgatcttgcgtcccgccaacatgccgatgtgctggaagacgacttcaatcttatctcccggtagcaccatactcgtgaatgagcagtggaagctacggaaggcgccgatggttgaggcacaggtgtagtgttcgacaagtccacgtacccgtgccgaggtgtacatgccgtgcgtgatcagacctggtagatctgcatatcgcgacagcgacgcggacacatggatgggattgaagtcccaggagacgtgagcataagcctcgttagagtgtggcatagtgagaatcaaagattcgccatcgttagtcaagggactaggctgatcaaacatagcgcgcttctgcactggactaccatgacgcttgaggtaatccatgacagggctacctcggcaggtgactgcgtgatagtctacggtcgcaatcggccgcgaaccacctgggagcgatgaattcacgcgaacttcaccaacagtagtaacggtcttgaaggtgtccttgctggcgtattggtaggtcgaacgaagtacgaagaccaaagtctggttttccaggtcgagcgaccgatccaggggctggaaccaggacttcgagttcaagatcgcaacctccatcgggctacgggggcagagctccatctcttcctcgtccactttgcggaacatattctcccagtctgtgtggtggcctcggtagaggaattgactgcttaactcgagcacgaccttattctcatggtacacatccgcacgtacctcgaccaatttacctgtctcctcgatcgtaatggcttgtatacgagacttggtctcaagtgcataacctgcctgaatggggtccgcatctgcgggaatgcggaagccattggtgagatgcaccagcgtcaacagatcgacgtcaagctcccgcgagaaaagcggcttcatcaaagcttcccagccaatgacgacaccaaagtccaacggtgccgccatccgtttgccacgccgcttgctagcggcatcgctggcattctgtacacaatgggcgaactcggcgattgagtcggccgtcacctcaaactgcgattcgcggaaggtgtcgtggaccgagggccatgtctctggtggttcacccgcgaaccagactctatagtagaagtctttgacacgctggttgcggccttccataatttcatggatgggagcgtaaacagcctcacgcctgaactggaacttcaactgcagcccaatagcggcacctccagcattacgttagttgatgatctcaagcgtgataacgctaggctcatccactcgcacctccacgaccttgaccggctcagagtgtggccgatgttcgaacagcgtgattatcggatctgccgaaaggcctccgtggccctgctgcaccatcacgtatgattcacgcgtgggctggaaaagccgccgcagcggattctcgcagatggctcggccctgcacgatcgtcgctgcgtggaagaatgcttggcgccagcctccattggaaccgcccaaggccacaagccattctgctaacgagggtgtcggtggcgcaccgggcgcaccgtccagtggtttcacttcatataacatcgcgcctgtgtttccgacgggcgagcaatgaatgcccagctccgcaagtcgccagtcctgtgggacagagtatgggctgaagcagtcgacaatagggataccatcctgctggtattcgggatcttgctgctgcaggcactcaatgtgtccatggtagatgttgcctaaaatgtcgcctgccggctcgtccaccttagttgaatatcgcgccgccactgggccgtacccggccgacatcagcgtcagcaacagctgcaagatcctctgactgccacagcgagtcttttttgaagtaagtctcgaagttttcgtcgaggacagggacaaacggtactggctttgtgccgcgtctctggcatagaagcaaaaagtattccgcatcttgcgtgccaataagctgggcctcagcggtcggcaaccgcttcaagatggcgttcagcgctgttgtcggatcagcaagagcctcgtcgccgttgacttcgctgagtccggggccgggggctacgtcgccaatgcgggcatccacgcgctttaggaaatcttgcaggaacaagcggtaggaatcatcgatccagcggccctcagccgacacataggtaagcgcaataaaacggcgcagaacctcggcgtaagtcatctcctccaagtcgataacagatccctggacatcgcacccaaaccagaccttcaccgaatcggtattcagtcgctgaatcaggtagtcacggtgtttctgcagatacgcgacgcgcttactacgatcaaggctgaagacattgcgatctaactcagcccatagttgcacaccccgcgtagccagcttatgaataggttcccccatctctgaggttacagtcataatgccgccagctggttgtgtgtatgtctgctcccaatcaccttcatcctcgactcctggcgcattcacaattgcctgtttcacagctgggctggtatgcgcttctttggcggtcatcaaacgactgccgagaaggataccatcgaagggcatgggcgggcggttataccgacaggcccaatcacctgttaggtaggggaatgtgtcctgtgcaccgccaaagccactgcccgctacaagaataacgttctcgcagcggcggatggagtcgtaggcttgcaagatcggttggtggaagtcctcgaatgagtggtggccaccacctcgcccacctgtccattggagtagaatagggaaggtgggatgagccgatgcgatgtcgaggacttggtatatcgcgggtaaagtgccaggcttgaagcccatgtggcgtagaccgagctcgttgatgtaccgagtggccacctcgagtgaaggcacgcctgcgccgatagtgagtccctccaggggaacgccggccgcgcgtaatttggccagcagcggaatctgccacttcaccgcgtgaggagcggcgtagatcatgttgcaggtgatgccccggccagcaggtaccgcgtccagcagcttgtaaacgtctgtctccaactgggcggcttgatggaatccgcccagtgccaattcgacatgatagccggcgcgcataactgccgcacagaaatcccaggctgcagttgtgggcgtcattccggccaccatgactggtggcaagcccaagaggcgactgagcttagtatcgacaagcacgccgccgccggcaatctgtaccaactgcggtcggtagcgattccgccatataggtccgtagacgagacccttgggcgcaggattccagttaaagaactcactgcgatctcccagctcggtgcgggagctggagatgcccgtggccaggatagtacggacgccagtaccctccttgagtcgattagtgagagttccaatgccagatgcaccatcaggcccaaaagcaagaatatgcgtggatccgggaaaatgcacggcccgtggccagacgacttgctgggtcgttatcatcgcaatgagcttgggaatcaagttgacggctccacacttgcgtagatctgtccctgtgtgggtgcaaaagacagggattcggagttggtgaccggttatggtgaaatccgcgacacgctccagcacgcccggagcgacatctgttagatagctgctgtggaaggccgtggttattggaaggaatctggtatggatctcaggctttcgctggctgaaaggaatccgatgttgcaagccctttgccggagctttcacctgtcgtagccaaacattaaacccatgaagtgacagtggcggtccagccaaaacggcattggtaggcccgttgattagagctatctcaatgcgggcatcaacgggcaaatacccattgacggaagctacataggtgcggagctgggagattggacagtctgccacactcagcatgggtcctggaaagccctcgccgttggcttcggcgtctgcgacaacagccggcggcagctggcccacggcaaattggtcctggctggcagttccgatggcgagcagcaaccgaagcgcatcgagcgcgagcgcgtcgaattgcgtccatgattgtgccactgcaatcacagtggctgggatgatgccttgagaatgtcccgtggctccagcaagcgcggtctgaagctgggcaggtgtggtacccactatgcgtccgacgactcgataccaggccagctgcaacaaaccgatgagcggcatactgatagacgcaccgattaggtagtcagatggtggcgtacgatccgggttctcgagccaggtgactatgtccatgccgttgtgatagaatcgactaatgctctcctcacgggtctcgcgctgcagcatactcgagactgacggaatgaggtcttccaccagcgggcgataggtctgccagagcatccgcagctcttcaaagtaatcttcatcattgccctgcccgccgaatacagcatatagtcgtgctttgcgttgctgcgcggcagccaggagcgcagaaggtgccgctggtcgactgactttgcgcagaacatggcgcgcacgtacgtaagcagctaaaatggccgactcggcgtctgcggagatgtccaaggcatagactacaccatggatctcgcgctgcagtagaatatcacgatcgaaggtatcgagggcgatggtcaaaagatgtcggagatcgtcagccaatccatgaggagattgctctaaacgacgcacggtaaaaccaataaagcgggcccaaagctccaccagagaggatatcggctcggccccaccagcggtttgaagatcatggagaaagtcatcgcgcagctgaagcgcagcggggaatgaggcagtagaaatggagagggtatgtgtgaaacggccatctgtgatggtgaggatttggctgccccaaatgttgctgggcgacgacgaggtggatagttcatcaggcgttgaccagttcgaggaagtcgaagccgacaagacagccgacggccccggcaattcggtcgagatcaacatgacagagaaaaaattgagccgcctaggctaggcgtcaacatatttttttccccatcgcgaacgccagaccctgccgtatattcttcatttctttgtctctttttctctttgtctaagcatcgtcgttgacggtggggcgcaatcgtgacgggtgggtcttgtgagatgttgagccctaagcgtctcaccgtgcagcattcccaaggttgccgccaatctgacacaccaaaatagcccggcctctatacgaggctagaggcgcttggggggccagaaatgcgtcggaccaatgccgatcaggcagccgttctaaaggccaaaacccgacggctgatcgactgtgagatttaattcaatttaagaatgtcgcccgtcagcaccttgtgacttttctccgctcgtctgttctgttgttcttctatcactgtctttgatctctgagtgctgttacactcttgttggccgttattatgggttggccaactcattgtggtatgttcttcttctattaatcttctgggccttgactgatcttgatagatttgtccagcgaggacgctcaatatgcctactgcgccaatgggcccgccgctgtcttcttcacagttatattcggactcacctggatcgctcatttcgctcaagcggtcatgtaccggaagaagttctgctgggtgattgtagtgggcacagtgtggcaatgcatcggaatgattatgcgcacctactcgaccatcgatcaaaccaagtcgacgaccacggccgccggacagctgttgattcttctgacgcccttatgggtgaacgcctttgtgtacatgatcttcggccgcatggtctactacttcttaccagagaagaaggtggcaggcattcgggccgaaagactggcccaaatcttcatctggcttgatgtgaggtgagtttcgccccgaaaggcggccctgggtcaactgtccaggacactcttcttgtgtaatgaaactagctgactctgatctgacagctctttcattgttcaagcaactggtggtatcatggactcggactttagcaccgagatgaacaaaatcggactgcacatctacacagccggcattgcagcgcaacagttcttcatcctgtgcttctgcggactactattcgcctttcaccgtcggatgcaagagcgtggtagcatttctcgtggcggtggctggcgcccattggtgatggccatgtgggccactttgacattcatcacggtaggtcacctttccaggaccattagttacagacgactaatgcatattagattcgaatcatctaccgtctgattgaatttgccgataccgacaaggccgggacaagccccttgacccttcacgaggcacccttttactgcctggaattactgcccatgctctccgccatggtcatctggaacatctggcaccctggccgttatctccaaggagatgactgtgactttcccaagaaagtaaagctgtctcgcaatgaaaagaagatgataaagcaagaagccaaagatagcaagcgccggggtcatcgtcgctcgtctagtcgtaagggtgcacgtgtttctgagtctcacccggcgaattcgttcgacgaaggggctctggagtcgcagggttatccattgcgaggacatagataatcagctacatatcaagtagggagtgcatacagagagagtttttcagacatgatcagcaaagtgcctattgtaattccaagcattcagatttactttcaacagttacttgtgtcacaaacactcgaacatgtatcaatgccggatttcaaatactatctgcattatcttacaagttgttcaatctaagtctgtcgagaacggacattcacactggcaagagagaggtataagtactaacagttagagggacattctatagggtagtcctggaagatcagtagcaaaacctatcctccgtggccgcacgaatcataagcttaatcaggcaaatggaaaatctaatatgatgtgaccggagttttgttggaactcttgtgtgtaaatagaaacagagagtatcccgctcacctgggcaggcttaacctgccactagacccaggaaagaatgcaagaacaaagaagagacacctgggtacgctagccccgtcccagaggcaaatgaaccgaagatgcagagaaaccagaaaattgaagatgataatatatcccaaacccattcttatttatagaacagcacctatatgcaagcatcataaaccctcgtctgcccctcaaaatctgaaatatccaactgcaccccagcatgaaccaacatctcaactagttcttgctggttcgactcacaagccatatgcagcgcggtacgtccccaccaatcctgatcattcacagcacgggctgaatgctcaattaggacgcgcacaacccccggctgctgagcctgtacggcgatatggagtgctgtctcaccctttcgggtaacccagctgattaggtctcgaggtggggagctagatagtagcagtcgcactacacctgcgtgaccttgttgcgcggctgaatgtaggggcgtgaagcccgtgctgtcgggtagggcgggatcggcaccggcctgtagtagtactgctaatacggactcgtgaccgtatagtgctgcgcgatgtaatgctgtgtgtccatgtgctccatcaggtcctcttgtagtggagctgccggtgctctctggggttccgcggggggtgtgtagaaatggcggtgcgggtgttgagcaaagaaggtctgtgtcgattgaggtttggaagggatgggcttgattcttgggcgaggtcgagagcgaatcggagccagagcccatggtcttcaaattgaagatttgatgtgtatcctcatccagcgattgtgcccaggggcttccggtgaggccaacttgatccagttgcgaggtgtatgaatgtagatcggacggcagttgtagggggtcctgctgttgtatatgatggtgaggatccgcatatggttgcgatggccattgccctgatgattgtggtcccacagcaggttgctgctgtggtgcccctggttgagaagattttgagtctagaggagaagacagcccaccggcggccgatctggcagtggctttagtctgtgtgctgttctgggatgtgggattctcgtcccccttgcgtaaccctaaaactcatcatcagctctgtgatctaccaagatcgtcccgctctatccaccgagtctcagtctcaattttgcaaccaaagacaattttcctactcactttttcgatatccacgttgggcaattcgattttgcgcccgacgacgctccactgggtcactgatattcgcccagttctcgcccagcactggggttctaatcacgaagatcatcgatttagcttaggcaactccaatccaatttggagtcagggggagggggggagacgaacgtgatcatgatgcatagaggctcacctagcatggctatgcaggcaacaagtaaaacaaccacaggcggggaccactcattcagatccacggtgtcacaaagcagtctcagtcatgatacgcattaattatccgcatggctctggtcttcatctccttttaaatcttgctgacgaggtggcagtcaagaaccaaccatcttaggtgctgttcgagcgcatccgcgaacggcggcagtcaccatcgaccgtacccactgataatgcgcacttgttgcgtacgcatttggatacggagtttccttgatcgtacggtctgggtacccaggggcataggtgccagggtcattttcggatttaatgcatgcaatggtgccttaatgccttaatttggactggcaaaatattaaaatacctgaattacaattacagaagcctatatacctgagtatcaggcctatagagcgatttctgctatacaactccatatgtcatatgattctcaggcggtttggacctgaactcagaggtaatagcgatctaatttattatatctcttaagagaaaataatatataacgtattcagtaaacgagctacgcaccccaaaacacatagtaaaagcgataaattacaacatgatattgcaacaacggtggtcaatataaactttatcttgtagcccatcactctccatatgatatctgatcactctagggagttttgagaaatttgatataatagtgatttgagatatatatatttcctatagttcagtgatgtaattttcaataccgcaatgatgcaactttctgatttatttgaaattgagatatattgctaaacatgcttatcgatggctatcgacaagtaatgaaagcaagttgagacgtggttgttgagatataaatgtggaatatgttgcatttactatggtgttttggggtgcgcagctcgtttaccgaatacgttatagattcagctgaataaaggtagataaggaggagagaaagaggaggagaagaaaaggaaaagagaagaaagaggggggaaggtatcacctcggcaacggatatttactcacgcgttagtcaaagggttcgtccggcgtactggttattccgtgctgaaagctttacaatacactgtatcctggggcctgaaagcggtcagtgttaaggctaacattaggccaaattaaggccaaattcaggtactaaggccacaatatactacattaaatccgaaagtaaccctggcacctatgcccctgggtagtctgggtatactccattgtaaaatattcagcaaaacccgtggaaaaatcctttgttcctggttgcacacgctaatgcagactaatggtctgagagtgttttcgtttgaccaatagccgaaatgcctcagcgatcgggctagcggcggggtttcctgcccaggtgccaatagggctgttaaaatcacttgaaatttaaaaatatcgtttcaatttcaatttcaacgctaaaatattatttcatttcaaaatcggtctatgcctcaggcatggacccactcttagtagtccaccaattagataccttaatttttcagagagccaataagattatcatagcttactctaagcctaattaggccgaatacaggctcttacctacaccgcctagtattcttcttagaccgcctacgcttatgtagcgctagtccgctagaccacgtagagtgcaatgtataggtcaaaaatatatctctggtaatctaggtaagaaaatgctccctatagcccctatatccggccaccccgtcctgcttcaggtactcttatacgaggccgaactatataccgataatatctaattatcctaccctatatctatagaagacttatagtcaaagagtcgctctgagtactactatcgctagtaccactatcgctagtactactatcgctaatactactattactagccctactaccgctagtaccacttcccttactactattagtactactagtaggactatagggactattattattattattactctagttatcactcttactatcttaatagtttagcgggtttataaagggactgtatcgctatacgtaagaactagcctctaaataatctatagggcagtgtatatagtagaatttccttccctatcgttacctaaagcaggtattacagctagcgatacctttaagttagtcatagaaccagcctactaaggtatagttacctctacagctaggcttaagtgtgaaatatagttaatactattacctcgaaatcactaggtatataattatattcttacctataacgattctactatattcccttcggcctatcgttagtagcttaaagtacctagtatagaaggtctagaaataccgatatatagtagataggttattatatactatactatatattatattgctatcgctaataataactaggtagatatcctagttaactttattctatttaagtattaggtttagcggtctattattagaagtaagggtaagcctaagctctctagataagactttaggtagatattatcctatacctaggtagagttagtaagtagctagcttctaacctaggttagggtcttatactaggcctatatatatttagtatatattaggaagatataaggtttttaacttactataggtatatccctatactagataagggtttatagtattctagactttatttaaagtaaatatataataggaatagctatcggtagactagaagactagaagggctactatttttataaagataagatatacttaaacttaaagactaagaaaattttagaggacttagaggatagagattctagagtagaaaggagagggtttataactattctattaataaagaagtattccttctacccttctaagggtatttaggaatatcgctttctattaccttcctaataaagaagaggtctatatagaattctttagttctttagttctttcttatatataatactaatattataaagatactcctataataagaatctccctttattactatctaaccgtttttagactattagttataagcgactgtactaggatatttttataaaggagagttagaataatattaataacttttctaataggttgatctctaggtttaggataaagtactttaggtatcttagcgcgaagatactttatagaatacttagaggatagagtagttagtattttttattttttccttatagcctaggtcctatagttaggtagctaactctacccctgattctattatagatctaggttaaatataacttctactctatatcctattctagaaatactatataaattattgactatctaaggggaaagtataagtaaatccctactaagatctgtataatctttattaaagaaacgaagaaaggtaaaatagcttaaggacctattagcttttaaggttagggtagctatagccttaggaaataaagggataatactctagctagatagctttactagtctagctggctatttttacttatagacgatctaggcttctaggaattctatttacttatagatagtacttataagctacctacttattaagctattagtaccgaactccttaataaatagtttattagcctttagaataaggttaatataagattaaagataatatagtatcttaatcttacctataataagtcgactaataaaagtagataccgaatctttaatatcttattcagttcttagtcctatagtatctattactatagagataagattaaggatataagtataataggggaggaagttattagcctagtctttaagaaggtataggagtacctaatctaagaaggtaataggttacctaattagttctatattaactctctagctatagatatatataaggtaataaatatctactactaactacttagagtataacctaagataagttatatattttatatcctatataacttatacagcctctagctccttctaaaggatatcctcctaagaagtaggattaagagtacgtttaagatagtattagagattatattattctttaactcagtactagacatcggcaaagcccacccggcccatagcccagcccagcccaacccccccaaaggccgggggtttgggtgaactnnnnnnnnnnnnnnnnnnnnnnnnnnnnnnnnnnnnnnnnnnnnnnnnnnnnnnnnnnnnnnnnnnnnnnnnnnnnnnnnnnnnnnnnnnnnnnnnnnnnnnnnnnnnnnnnnnnnnnnnnnnnnnnnnnnnnnnnnnnnnnnnnnnnnnnnnnnnnnnnnnnnnnnnnnnnnnnnnnnnnnnnnnnnnnnnnnnnnnnnnnnnnnnnnnnnnnnnnnnnnnnnnnnnnnnnnnnnnnnnnnnnnnnnnnnnnnnnnnnnnnnnnnnnnnnnnnnnnnnnnnnnnnnnnnnnnnnnnnnnnnnnnnnnnnnnnnnnnnnnnnnnnnnnnnnnnnnnnnnnnnnnnnnnnnnnnnnnnnnnnnnnnnnnnnnnnnnnnnnnnnnnnnnnnnnnnnnnnnnnnnnnnnnnnnnnnnnnnnnnnnnnnnnnnnnnnnnnnnnnnnnnnnnnnnnnnnnnnnnnnnnnnnnnnnnnnnnnnnnnnnnnnnnnnnnnnnnnnnnnnnnnnnnnnnnnnnnnnnnnnnnnnnnnnnnnnnnnnnnnnnnnnnnnnnnnnnnnnnnnnnnnnnnnnnnnnnnnnnnnnnnnnnnnnnnnnnnnnnnnnnnnnnnnnnnnnnnnnnnnnnnnnnnnnnnnnnnnnnnnnnnnnnnnnnnnnnnnnnnnnnnnnnnnnnnnnnnnnnnnnnnnnnnnnnnnnnnnnnnnnnnnnnnnnnnnnnnnnnnnnnnnnnnnnnnnnnnnnnnnnnnnnnnnnnnnnnnnnnnnnnnnnnnnnnnnnnnnnnnnnnnnnnnnnnnnnnnnnnnnnnnnnnnnnnnnnnnnnnnnnnnnnnnnnnnnnnnnnnnnnnnnnnnnnnnnnnnnnnnnnnnnnnnnnnnnnnnnnnnnnnnnnnnnnnnnnnnnnnnnnnnnnnnnnnnnnnnnnnnnnnnnnnnnnnnnnnnnnnnnnnnnnnnnnnnnnnnnnnnnnnnnnnnnnnnnnnnnnnnnnnnnnnnnnnnnnnnnnnnnnnnnnnnnnnnnnnnnnnnnnnnnnnnnnnnnnnnnnnnnnnnnnnnnnnnnnnnnnnnnnnnnnnnnnnnnnnnnnnnnnnnnnnnnnnnnnnnnnnnnnnnnnttgtacagagatcagacgaattggtaaggtgatctgggaatagcttcatttttaatatttatggatagatcattttttttagtatttgtgcgtagattagataaactagtcaggtgatctaggaatagcatcatttttggcatttatagatagatagattagatgaattggtaaggtaatcatgttttttaccagactaaaacaagtgataaaaacctataatttattaatcttatataatctgacttataagcgccaagacctatataaaatacaaaaatgggctaaaataggcccattatgggtttatgggcttagcccactgggctatgggctgggctgggcctaggggagctgggcccatagcccatatgggttgggctatgggctgaaatcttgggcccatgctgggctttgccgatgtctactcagtacctctataactaaatcgatttcagaaatattaggtcgaaatctactataagatatccgcgttcctagtatctataataatataatagggcttgtaatttaagatactctacttagttcttaaatactagtaggcccttaagtactaggcccttaatattaaaaaggacgataggggtagagggaaaaaagccttaattgcctctaccttattagaacctaccttttaggtagatctcgataagttaatctaactcctagagctaatctataaggcgtagcttatatctaaaagctaggtatccgatcttataaaggtaagtctattatatataaaatctatatataatatatacgaagtctatatataatatatataaagtatatataaaacctttatcagcctttattctaataaagataggttatttcttaatagattttaatctaggagtaccttaagacctatatattaatatcaaaattttaactaattatataggaatacctagaggataaaagcctaaatagatttaaatatcgatttaaccgataaattaagctaatctactagcttatattttatctttagctatcgatagctatctaagatccgtccttttccctagtactttaaaagctaataaatatacttatcttaaagtataggggagagcctactaaaaagtagttctagtaattttagaactaataatagcgttttttctatactaataatagtagtatctagtctaactaggacctagaggacttctagtataaggcgaaagtattcgctccttagcttactaatcttaccttatatagctataatactacagctaatttagttaccttagagcgggcattttctactataaactttatttactcgaaggtatacaattcgcttttacctaagaaggttaataagctagtctatctccggataaactatcgacttataagtaaagggcctatccagtagcctgacctagaaaaggcgtaggattagatagaccagtttaataaggagtagattattagaaatcgcttcttccaggatatgacttctcttaagcctcagactgaaagccttagtctaggaaataagctttctgactctaagtctactaataggggtaggtatattgtaataagtgtaaagcgtccttatgacttatataactaaaaatttactaccagtttttctgccttttttttctgcttatattacaaaatattactaatacattaccaatatattactagcgccttagcgtgaaacaattgaaattatattttaaatttcatgaaaattaaaaatataatttcaattcaagattttgaaattcaatttaacagccctaggtgccaatgctacctcctgttttcagagcaggttttgagttcgactccagaacccgcactgctccactggggagtggcttggtcaaaaggtacgagtacggagtaatccgtgtttagaccgacttcaacgccctacaacttccgtatgacaatcatgcgaccgagttcatctatatgattggatcatcatattagactgcccatcggtaatcggacaattgaggagcaagagcatcaagaaatcaattctgattcgtcatgttcgtaacagtcccttgtctttcatacaaataatcggggctagcatccatcgagacaagtacttccaaggtttggtcctcgggtaccaagctttcaggctaaccctccttttgtgatctttcctgatggggtatagtaggctagggtttacgaacaaaggatgctcactgtgcagcaggcctagaatattagtccccgacttctccactttgtacgttcggaagctgaccgacctgagttttatttagatgaaggctaccgttttgctggtagacaatttagcgcgttattgaacactttaattcaatttcggtttaatgccgatccacatcaatttacatagaagtatacagttctttacaccgattgaagataatcgtgatactaccggcaatgcgactttggatctgaggtcaggcgtccgaagtacagcaactaaatggagtgtcagcacttctgcagctgcagctgcatgcccttacactattgatgccttcccacatccctccgttcggggtttattgaaaaccaaagtggactataatcaaagggtcgatccaagtatcgacaagtgatgctcattcttctcaaacagaagtcagtcaagtcatcgaaatattgtaacttcacgcaagctctgctgctagtagagaagaagacagactgtcaaatacactttaaacccagttgaaatgtggaattgatcaattagaaatgtgcctatagatgaaaaggcgctgttttgtattattcgtagctctcagtgttataagtagtagagattgtgaatggggtgttttgtccgcagacagggtctcttcgatcggtacggagttgtgggtgtcctctctcaataaacgcgaggaatcaattgtccatgcatcatgtcggagcctatggtggattataactagccattccagagcgaccttgcacatcaggcagcaaaaatggaccaaacaggggcttaacgaatacaacaaaaatagacgagcggccttagcgccaatcgatactgatctgcctgctgcttctgcttagaacctttccaagtcaatgaaagccagaatgaggtagcctgaagctcttcatttatctaaaagcgcggttagttcgacttgtaaggttacattgattaaacaatcttaccgcaccaccgagtaattccgaaatgaagctcccctctctcgtcacagcgagtcaattgacttttcccctaacatttcaaactgcgttccacacaaccagcaatacagcctcgctgctttcagcacaatatggcacaacactcaacgtcgacgtgacgttcgccaatcagacattcaagcttctcgtcgatacaggcagcagcgacacctacgttgtcagaaatgacttcatttgcatcaatcaaacaaccaaccttgagatccctcaagcggactgccagcacgtctccccagggtacaacgaatcagacacctatcgtttgatccccaataaaatattcggcatacaatacggcaatggtatagcgagcggagtcatggcctacgaagacatcacattagccggtattactgtccccggacaagccgtcggaatcgtcggccacagcaatcccatgggcgacggcataaacagcggcgtgctaggcctcgcctatccctccctcacctccgcacatccaggagaccataccgacaatacaacattttggttcaatcgtgaatgctacagtcccttgttcaacaccatgtacgaacagggccttgtttcagaaccctacttcagcattgcgctcgcacacacgccgcgaaacctttctatgccaaccttcggcgggtacctcactttgggcgatctaccgccggtggcgtatgatccgaaatttgccagtgttcccgtagaaattttggaaaacattccgcccagtttcacctctggcaagcgcactcgatcatattgggcttttaccgtgtctgctgtgacatttggatccacaacaaaagtggatctcaccacgagcacgacctccataactaccaacagcatggagttccaggtatttacagataccgggaacgactacagctatctgcctgctgtggttgcggatcccatcaatgccttgttcaatccgccagctatctacaatgagacgctgggagttgctgtcgtcaactgtaatgcacagccaccgatgtttggagtacaaattggagaccagacattctatcacgatggacaggatctcatttatcagaccggtgatgggtactgtgtctcaagtttagtggcgtcggagcgtgtggcgtttgagggcatcatgttaaacattctgggtgtgccgtttttgaagaatgtggtgtccgtttacgatttcggtagaaatgagttgcgatttgcgcagaggtcggattaaaaactggggttggggtagtgctttatatatttagatgaaccagtatcgaatcacgattcatgaccttgtatttagtcaatttctcaactggatagggacattcgcatccagttcaattctagaattcatctcttattcaaacctctctttggcttgggcggatactttggtatgggcaatctcttgttcgtgtctcctgacccgctgctcctgcatgggattaaacagtaaagctgccggctacgagaatattatcgtgctcatcaacaagctgcagagcaagaaactagctccagcagcaaacatagacgcgtacgaaagctgggtcgttctggagatttcatcaatggccgccatttattcctcggtgctggcacagcggaggagctggataaccgcatcggtgattgcgttggggacttagccctcactagccgtggagaacaccgactgatcagtctatcaacgctcttgctttcacactaatattaagatcaaagtcgacatgagtctcatccagctgaagacaataacggccctctatccactgactctctccgcactgggagatttctttacgaccagtattcaacgccccagggatggtatagccggtaactccagctgattgtcaaacgctgggatcggccaaattgctatgatgcaagatcagcctggtcctaccgcgacagtctgcattcgatattaatcaaattcaatcgagctggacgattcagacactcagcatggtaggagccagtccttgccacaggaacctagatctcgataccatgacgaacattccggtgaagaaccactacggggatcggtccagttgaaaatttgaactcaagacttttgaacctgaacttggtgaaaaggaactactcacgacgcttccatcgagaatgagtcctcgccgtgttgagtgtctcctttattcctaggagcaagtggcggcagcaagagcgataatccgttaggaatcaagacaaaaaaaaatcatgaataaaacactaaattggatttacaaaccatttgactgaaattttctaagatattcctcaatattgtagaaccaaaaatagagggttagatatttcccgcaacaatgagagatggtatcgtgaatacgagacttaacgagctgaatagtggtatagccgtagaatagtaatgccaataaatgtggtcccactatacatttgcctcccaactagaggcgaaacaactcaggatcgaccgccatattaataacgccagcctttcgttgaggggacaacgggcaagagtgctaggtgaacgactgcattgggatatggctagcgtggtgcattttattgaggtgagctgctgacttagctgttccaactttgctcaggtgacgctcagtgagcgagttcatccagcttatgtaatgatcaggcgatgctcagcgagcaagtgcaagtttaatgattatgtaatacttaagggcgtgctcagttgtactcagtgagcaaagagcggcaaggggtgagcacgaaagcgaaaagggaaagccatctcgctcggcctaaaatccggtgtatatgtacgtacctagcagaggcgatttaactatgtatatcgcggagttactctgcggtgacggcgaattactaatttcggtttagcgtgcctctttgggtctagctccctctatatgactgatatcgccgtgcgtatgtctataaagttgcctttatcgccccgactgttactcgccgaacgtttcgacggttacggtccctttcttactatctatatcctatatatgtcctgctaataaggtatttttgctattaatctagcttactaagccctactgcccccttggttactagtgtgacgatctgagaaggatcgtacttgctaaacggggcaggagcggtcacgtcctcgtacttgccaaacgaggaaggaacgactatgcccttgcaccttcctaaggacgaacgagattaagcgagacaaacgcaagggtataagaagggaagaacgcgcactcagatagtttctctttttccnnnnnnnnnnnnnnnnnnnnnnnnnnnnnnnnnnnnnnnnnnnnnnnnnnnnnnnnnnnnnnnnnnnnnnnnnnnnnnnnnnnnnnnnnnnnnnnnnnnnnnnnnnnnnnnnnnnnnnnnnnnnnnnnnnnnnnnnnnnnnnnnnnnnnnnnnnnnnnnnnnnnnnnnnnnnnnnnnnnnnnnnnnnnnnnnnnnnnnnnnnnnnnnnnnnnnnnnnnnnnnnnnnnnnnnnnnnnnnnnnnnnnnnnnnnnnnnnnnnnnnnnnnnnnnnnnnnnnnnnnnnnnnnnnnnnnnnnnnnnnnnnnncttgccgcaggaacgactatgccctcgtaccttcccaaaagaacgaacgagaattaagcgagataaacgcaagagtataagaagggaagaacacgcacttagatagtttctctttttcctttcttcctcgtacttagaatttgattggaattgcactcttttcttctgaatcgaattggctcgtaacaactagcgcgaactgactaatcctttaccctcgttcgatctctcgagtactctatacgtagctttacctcacctatcctataacggataaaggtccgtacaagagggaaacacatataaacctgcacaggctcgggaaggaacatctatgtcattacatatctgtttcgatatcaatccgtaacttcaaataacgcacttctgtacattccttatatctaacctgtgtatcttaacaacaatgttattccctggtctaattattcttagatagcgatcgataaggatcttaaactcggcatcttaatattaaggtaatcaaacctctactttattatggtttcgaaaattacattgtctagagcttgaaatatcttgaaatatatatatcacgatcacaaagtcataaaacttatctaaacttagtaaagaggctagatatcacctaagaagtatcgagctataagaaaaacctcttatagaccaccgttattaagatatcaggttgtaatttatcacatttactatgtgttttggagatggcgggtcgtatgtggtggcggctcgtatgtgaattacgttagtggtatattagtagtcagcagccacgtgtagcgattatataaacacataccaagataactagatctcggaggagaaccctccttttcacaaattacactcattttaccctttggtccagtatcctactgctcgtaccatacaaaacagcctctcttttgttcaacatatatcttttatctatgatatacgcgccgagggcgttgatatataatgaatacttattcctgtaagggcgctaaacctaacttagctagtattatatttaatggtctaacgcgagcgctgggtgaaatgaccacgatttcccctcgaaagaccacgcacaaacgtggtcttttcgccgtcaccccgacttactccgtacaatctttccgtacaatatacggaatccatagctctgtttatctcaactccgctagcttaatcaactagacataacaagaaatagcgtccctcaatcgtatcagcccagggccattagcctatcataacctctgatcgaccctcttagtacaaagtgttttctgtattcacaaattccaatcacgcttttctctcctttttattttacatccgtgatgttccgagggaattcgactgcagatggtagtcgggggcccctgtgagattaacttggtttcagtgatattaatggtcaaacttggtatttaatattatgggtacttcatatatatacggagtccaatttcaggcctatggctggggcgcagtcatgacatctgtggctttcccctaccgtaaaacctttcataagaccgattgtggctgaagctgagcaatacgatggcttttatataggaagatctgtttccggatctccgcaaacgtggttcataccctagttcatctgaatgtgtacaacatacatagatattgcaatagaatacggagtatacagagttgtgtctatttccggctccgaaggaagatggaagagaggtgtcgaatgtactgtcatcaatgtggttccacctgcacaacgggttattattcgtgcagtttttattattatattgcatattccgttccccccagagatctggaccccagcttgatatgtgatccatgttctagccctttaatattgagctggaacagcgaagacacattgcagccattgcagccattgcagccatgcctgcatttcacactctttgagcatgccgtaaaatattaaacctatttttatgtcattagcagattgaatgaacccaaaaaaattccccgatgtcagaaagatacttggggccgatcccttgatgcggtcggacaagctgcaagcatcattgcttcggcacgcgcgtcgatcactactttggtatgttgggattatcaactccgcctcccccttctaaggcatgtggacagtcgatcctggacatcccttgtaattattctctcagcctctcgccttgtgcaggacccattggtgaactatcgatatctcctagtcgggcagtttgaacgagtctgaaatgatcaaaagtcgccaatctccttgtatcggggttgatggcctttttactctttgtatcccgataacctcttccataaacacaacattctttccaaggttcaagagaatgtcgcggtggggaggaagaggggatatttgacccctcctaccgttgttccaagtcgtacaacatacgatgcacaatgccctgtggccatgtcctgtggtacatcagtccggtcgtcgattgaatgtcgatcagggatacaaaattgatgcgttcatctgcatgttgtccgaaccacccccaggtaccggtccaggtaccggcccaggtaccgtatacatgcacagttgatgccgtgtatgggattcgggagccgaactagacctatctccttggaatggttcaaagaatgtgcccgatatgccgtcctgatttgaggaactggagatacaggtgtatgctgtttacttcggtaagactacactggaagataaacccacggtccatgtttccagaaaacacctgggcacgtacaaaagtacttcgctttgttggcgggattcccgattataggttattctggacgaatctggagtacggagtactttgacactatatatcttgcccaatgttagttccggccgaggtaggtgggtttttggagtggaggtaggtgacgagaccaccgacgcggcaaaaaacgcgtcgttggagtgctccaattaacgaaagacgtcaaaagaacagtacaacatacaacatagagagcgagagagtgggaaaacaaggacagaagcagatcggggaggccgtttttgggaaaggcaaagtcaatttcaaaattacggtattgttctgtacggatcggaaaaggaaactaaagttaattatagcatcagactatcaaggcaccaatatgtactccgtagtacatgcccaactctcaaggctagcaaatatagattgctatatataattgagttggcgatatctgcgcctgaccatccatgtgtgtctaccaagtatgtatttcgagtatatagtctacgggacaagcttcagtctaattgttgttccatatatcagccgcaaaatagccagatatggaggttatacccgtaggatgttgagtagaagtaagcaggatggatctcaagagtgtatatccaaatagacgccaaggaagtagatcaagaagaagattaagaacatctgcatccatctcttttccgtcaaaatattcttatcgctccttgatttccgtttccggactgagggatccacgaccattgagaacttccaagtatcaaggagaaaaaagggaaaaaaatttgaaaagagaggtttggataaccgatcgcattcaatcgttttggtctattattttacttcctaaagcgtgaaggcaagagaaatcgagaggaggaaaaaaagataacacggcaaaaagaaacttgaacgtggacaaccctgtcttttcccccccccggtctaaacttccattcgaatttcgaatttcatccttcctctgattacaactctccttccctttttttcctcctcaatttctcttccctcttccctctttcaatcccccttcgctcttttcctccgttctctcgttttctcgtgttatagggaacctagaccttttgacctgggactttcccacccagttccttccagatttgagagatcatggctcctcctccacgtctgcgcatcctgtccggtgagttcaacttccgcctaaatcttaacgtctgggatatcacaaaaagatggttcgtcgtctaacgaaagtctgtgtagtcggtggcaatgcgatctcagcctttctctcatggcgacttcaggcgacagcctcctgcgacgttacgctggtctggaaatccggatttgatgccgtgtctcaatacggtgtctcgttcaagtatgtatctaggttgctgtgtcacagccagatggctaactccctccgcagatcaaaagcattcggcaacgaacgattcaaaccccgacatggtgagatttcgatatcaacactcggcctaagccctagccagagcccccggctgacttgtcccggtttctagttgttcgtgctcccgaagacgcctcatcccgtgaaaatgcctatgactatgtcatcctctgcgtgaaagccttgccggacgtctacgaccttgcctccgtcattgaatccgtcgtcactccccagcacacctgtattttggtgaatacgacaaataccctcggcattgaagcccatctcgaacaaagataccctaccaatgtcatcctttctctcgtttccaatgtggagatctcccagacgggccccagcgagttcgaacatctaagctcgagtgagatttacgtgggcgcaaccaacaaatcttcctccatcccgacatcagtccagaacgacatggcggcggcattggcaatgactttgaactccggtcaggtcgactgcaaggtttccgataatatcagacaggagcagttcgaccgaatgatagggtgagttcctttcgatccgctcgaatccaaactttgcatgctaaacgtctcccagcccgatcgcgttccatcccgcaagtgttttgttcgacaccccaaaccatacacaactcctcgaaaaaaccggtgttcgtccactgataatgggcttgatcgacgagatgatggagctggcctctgcgcacggttgctcattccccagcgatttcccggataagacggtccaaaaaatgattgcaatggaacccccgaccacaatgtactcagatttccagggccgacgccccatggaggttgagactttcctagggtcaccaatcaagttggcaatcgagtccaatgttcgcgttccccggattgaaacaatgtacgcaatgctacatcacatcaatatcgcaaaccagaacaagtcccggcaagagtcaccccctgcatcggtcatgggtcagccgcctccccgattgtcttccgcacccccacagcagcggcctatgatgaatggtggcccgccatctatgcggggaagtcgaacaccctcaagcatgagcatggtcccgccacaaagacgaggcccaccccctggtatgatgccaaggggcccaggcggaccgatgccgatgccaccctccaaccgagttcagcgcgacccatcattggagggacttgaggaattcagccatttggttgtctacgacgagcagggcgaaccgagtataccgcatcagaatggaaatgggtaccccgaaccagcacctggccctgcttcagagttgacattgagggagagagagctggctcttcgccaacgtgagctacagctgcgtgaacaggaaatgaacatgcgccgaggtcctccgggcccaggacgtcgtggaccggctccctcccgccctgccacggccttcgatgaagaagatgaggattactttgacccgatggataccatggcgattcctcacatcgaccccgacagtgtcgacatgatgagcatgacttcacgccgagggcgcaagggccccagccacagccagttgcgtaaaaacccagaatttggtgtaagcgctgctccttctggaggcagccgcccttcctcatcagccttcaaccgctactttggcagaaaacgcacgagtgaccgtgtgatgcaagaaatcccgggtctccatgattcacttatggacaaccccatgatgagctactcctccaacagatatggagccgttgaccgaaaccagatgcacgcggattctcgagccaattctttaacggctagccacatgggcgactacccacctcgaccttttccacagagccggcgaaacagccagactcctatgactccattcggtggacccccgggaccccctggcccaggagggccccggatgggtcgccctccaatgcaaggtcttggcccctctggtggacctaacaatggccagccatcacctcctggtaacatgcgtacgccggtgccgcgctatcctcagggacaaggaaacgcggcagggccgcagcaagttgagcaacactatggggtgagcaacgcgttccccgctaagggccttcctaaaaaccagaatctgaccggaagtgcgagcgccagcgcggggagtggtgacagtggagcaagtgcaaatattgattccgaaccctcatctcacagtagtcaggtcagcctcggcggccagggggtcgcggcgcccgttcgctaaaaaaaatcctttgaaaaaaaatcccgcttttctcaacagctgaccggcgttccatgattgaattcccttttcggcattgcatttttcctcggcttagacaatcatcgtccgccgaaattggtcatgtttggacctttttgcatcatggtgtcattgtgctgggactttattcttcggtcccgtgctattgaagcactggttaatactctgctgttcgcttctttacatatacatgagggacataggggtattcgttgctcatcttttcattttttttttgtttcggagtgtggttgggataacgaggtgcgcgtgcgagttttgtctttttttgtgtgattttgctctgcatcgatactcatcctgtttcgcggcattatcgatttttaatgaggccactacgcgagcctagactgggacatccttatccttgctgtttctcttcctcctacctccttttttcatctttacagcatgtcgatatagcgtcgtcgttggctcccctgcccaccttttcatctctctgcatgactgtatactatcagctggcgcattccgtttcctcccatctagactcgtatacgcctattgtctccattttgtctgttcatcatcattcgctcccccgggtatttccttcatttgccgtgtctttttccttgtctctcattcggcttggcttgatgcaaatggcctcatctttgattttgtggttcggtctggtcttggcgcttccaaaagagcggggattgaatttattcggttcattgagttgtgtcgtgatctgcttatggggttcgcgctttgctgagaaaattaatgaagggtgcactgcagtgttccgtttcgctgcatattttgaacagcactttattgttccaaggagcacacaaattgatagaccttaccgttataccgttgaggttgttacagcttattaccatccaagtacgtactattttaatgaatgaacaggagatattcgaatgctgtataaaatgaagtatatctgtatcgacacgtgattgcctgatagtaaataatcgataaccaacacaacctcaaaacaaaatccaaccttcacgcgagcaagaccatacccagaaccatatctcccacttgagccagtttccaaattataaacaaaatgccaccccctccaatccactgccgccaagaatctaacaccacctactcccgcccctctatcctcccagggaacggcaactacaacacaacagcaacccacacattcaacgcaaacccaaacactatatacacccccaattacaactacaacgcctcaaccccttctatgtccgctgctaaatcgcggcaatatgctcacctccattcccagctcgcacagctcaacgccaacctcgccgacacggagaacctactccgcatgaccgccgtgcaggcaggggacatgcgcttcctaggcgggtattctgcggcgctttttatggcgtctgcgaaaatcctgggagaggaaggggtcaagggaaatgcggacaaggagaagaaggctggttccgaagaggggggaatcaagagggaggagagtgatgaggattgaattgatggatcattatgatttggtattgatttgatatgattatggtgagtcggattgatcgtagttgtgatgcttcatgggctgtcggtaataatttccatgacttggtgtgctaacatatgtccaatgttcaacccaacagcagagatatgactccctttcttcttatgctctctctatccaaatgaggtgttttcttactccacaacgaattgaccaccgagaatgatcgctggctcatcgatgttatggtgttcataactatttccagtcatgttagctgtgctccatatactacggcaggggggtgatttatctctgcctaaaggccgagccagccttacctgagtgtgcctacaccaccagcctcgagaatgagtgttgtctccgtcaacggctttccagtccagcgcatggcaaaagcacgcagaatatggccgtgcgcgacaacaagaacatcgcccttgagattatctgggttctcgaagcagggacgctggtatttgttcttgatttcatcgatcagagcgtcaaggcggcgaatgacatcctcaggggatctgccaggagggaaatggatgttagcatggaaagactacacccgaacaatgttcaacgcatagcttggaagcaagacctagaatcagaggacaacgaagaaaataatcacttactctccaccgggacacccatcggtccaaatattccacggcccctcgcctttttcaactcgcagctcacggatctgcttactcgtcaacccctcatagtccccgtaatcccactctctcaccgcctccgtaacttcaacctcagcctcggtccggattgcctccttgttttcgggcttcccttgttcaccccaaggcattcgtccccggcagccaagctcgaggagctctagggtacgctgggcgcgggcgcggggggagacaaagctagaacggctttgttagttgcctttggagtggaatagtggtcatcggtgtcggcgaattgtttcttacacatgagcgagcttcctgggaacaactagtctgtcgtttccgacgagggctttgcctgttgcttgaatgcgcttctctccattggctgtcaatggtagatcggtgacaccggtgtgtcgaccattaagcgaccattcagtctcgccgtggcggataataaagcatcggggagccattatatattatttgaaatggatctagtgaaaaggaaagaagacggaatgaaaagtgaaatccggcacaggttcaggtctgggtctctttgcgtcatgggtggaccccgataacaggcttatcaccttttctacctccaacctcggaagattgtccatgtgcaactattcggctttcagtatattaaacattagattatcttttgatctatccctagcccagcaaggatatcaacatatcactgacaagatacctcaagactgtggatttcttccgtgagatgggtctacactttgtagtacttccagtcttgatctcttcgaccatcgaatgccgtgaacacttcttatccctgaacaatttcaccttacagctccgatcgatattgacgttgatgagagcctccgcaactccattctcgaggttggtgcggcagcccgaggacccctgtcccgcgtagctgactgcagtgccaacgcagtgcttgttgtggaataggtcaaaggtccagttgtatttttgggcttggagttcttcgggaggatgtgaggtagggtggccagctatggttgctgggaggaggagagttagggcaagaagggattgttggatcagcttcattttggtttgatgggttgattgctttttctttctttctttttcaatgggagattgagctagatatagttccttctcagcattgtgtagtgatgactgccgtcctaggtcttaccgcgggttgacgcgcacatgcagttcgtactatgggaatacacctgatctacctatcaatttgtcttacaggatattttgcatacattcaatttctctatctgcaacttggccaaatgctagcctctgtcgcttgttataacccatgtcgatcatagccttggaacagtataaaccactcagccctctctctgaccttcgatccaatgcttctagagagggagtccaccgcctttctctccgccttgtttacactctttcaagtgagccgagttgtccaatattctgccaggcaaatatccatgccaccatgtcttgcttccacacaatattctttgatacaccatcattcaatgaaaccgtggacagcaaattccttgacccaaacgagcccttgggggacccatccagcccccgagagagcagttcactgaaactgtcggccatatttggtcatctaaaacgttaatatggaacgccgactcacctctagaaatgtgagcctggactgggttgagcgaggtgatcaagccggggatattgtctcagtacatctcattcaaaacacatatgcccggctgaaagcccagtatgcagaaaagttgcgccagaattgggttgaacaacttgagtcacccaaccaagcccttgagcagctgtctctcgctgcgtgcctaattgaactgtggaggagcatgtacggcgctataccaacaacagaacaagagcagctattggaaaacacagcgccgttcccaggattcgtggacctggcttgtgggaatggtatccttgtatacgtgcttctcatggaaggatacaatggcttaggctttgacgcttgccgtcggaagtcctgggaaacattcccatcagagatacaggaatgtctggaagagagaatcttcattcctcggccttttggggatgtactggacttggaacaaattggagcggcgatacacaccggcgatttcccggataatacattcatcatctccgaccacgcagatgagctcacagtatggacccctttaatggccgccctatcaaatccctcatcgccattgccattttttgtggttccatgctgttctcgttcacttgctggttcgtcgtatcgatatcccccgccaaaggagggtggtccaatacaaaagagtgcgaatggaaaccctgtcgcaaggaaagtcgatgataagatcgaacagaatctacagcctgcatctggtgatttgagggcacttcgggcaatcaagatcgaagaaaaggccgagagcgggtttctgaattcgatgattggatctctcgctgcaaaaacaatgagtcttgccgaggaaattggtttcgatgttgagaagacatggctacgcactccgggagcgattaacatggcgctgattggaggtcgacagcaggtcacaagcgagtggctaaagaacccggggtctatagattctctaacgaaaagaaaccaagaagatgctgttctgaagaagattatggaagtggttgagcgtgagtgctcccgagatggtggcattcgggtagctgctaagctctgggttgaacggacgaagagtcttcaccggggacaggggacagtgcaccaagcttaataagatattcaaatgaagatgccaatagcattcacagatgactgctacctacctatcctacctttcgtgattcaagtacatttttggtaaactctctaatagcagaaaacgagcccaatcctcctggacgatatcctgaaggcaagagcacaaagaatgtagagcacagcagcaacgccctaaagctagcgttccaagtccagaatggccgaagtattgataacgaaaagaaaccgtgtcactaaccatcttcagagaacctcgaagctaacaactgattcttcataaggctgcctcggtggttaacgagagaaggataactccatatagtaaataaccccgggacgaagcgcatgggacaaggtatattaatagcttgccaaggaagatcagcaagtacttggctccaacaggagggcccctttcaaggaaaatgatagggacaaatggcattaatatgtcatcatatatgctctagatctattcacacctaaacaaaacataaacatatagcgaggggaatagagaaaggagtgtgctaatgtacaataatgttacagacctcttcaactccgttgctaaatgttagttgaagatccaaatcacaacgcctaggctcccattataacgcaatcaaaccgtcaagacatacttgaatcactacgtatcaggcatcagacttcatatgatcttcggggcaagcggcctcttttccactgctgccactttccgcacgagcgttgttagaggccgtggctgatgcttgcatagcagccttggagttggcaggtgtcgtttttgatgcagcttgagctgcaaccgcagccgcattctccttgaggcgtctcaggcgttcaggtcggccctcccctgggagacttccccataccggttcgattgaatcggcacgccagttagtccgattcccaccgagcgcgctgcgcttcggggagagcggggagaaggtggagcctcccacgccggattcaccccacatgcggacgcgttgaagcttgcgcagtttggagagaccgtagacacagacgacaccagtcagagcaaagcagaacacggagacagccccaaaaccgaaatccgattcttcaatgaaattcttcaagttcatgccgtagagagcggagaataatgttcctgttgcgaggccgagtgttccaatgctgaatttgagatccatgagcatgagcgagttgcggttggcatcaaggatagccttgactctgagttgtgttagaggtgctttgcatatcatgaacgattcaacttacacttcttccgtattgcgaatactcgtcaccaagtttccactggcctgaacaatctcatcgcacactttgtggtatgactccagaagcatttccacttcttggtggtcatcctcttctcgctctttgccgaccgatctctcagataggtacattgctgctaaatcatcatccgcctccagcaaatcatcaatggcatctcgtaccaggcgagctttctgctcaaatgtacccagtttcttggagtagatcaagagatgccggagcttatctcggtcaatgtcctcctcgagtgcacgaagaacccgcacaacaggatctctcactccattgaactcctcttctaggccactcgtgacactaatgaggacggcttccagcgcgcgaaactcgtacggtagcggttgactggcaccctggggttgcctttggcggagctttccttctaaatcgtagatgaacagcgattgcatgtatgagtctgttgatccatacgcgtcaaaaacgagtacccggtccgctttgatgaggacgcgcagatgcaatagattgatgagaattgctctaggtcgtaccaggatatgagggagagtcgacgaatcaatcttacgtagatctcggggaagaaggccatactgaatcgtgatgcaccggttagcaaatgtcaaactcagactcgagacctttttaccaaccttggcaatcagctcctgcttccggaactctccgttaacgagtgtaacgtctccattgatatcaaactccgtgcatcgaattcgcagttcatttgacgccttagctgatatgctgcggccaatattaaacatcccctccgttccctcatccataagcccagggccagccgggccttgatccttgtggtcggaagctttatgccgcttgaggccaaaaagccgtcggagaaagggtcggcttttggttgatgcatgacgcgagaatttcagctgcgtaggcaccaatggcggcggcattgttgctctagtggaatttggtcttccatactgagtgctgcatagtgtggtatcaagtgttgcggggctatgagtattgagacgcgtccagctcgagaattgtcctgtcgagaagcctttatcgcggctggcaaggcgcttcggataagcgcatgctgatggtacggctgagaacccagactgcgatcgtagaaagcgcaataaagaggcagaaggcgcagacagcctcggagacagcatgtctctgaattatcgaccgagctgtatcgcaagttctcccgatcagatcagatacgcatttttttcgtttcccggaacaattttgacccgagaatcagaactataactggaaaacactattcctcatatcttgtactatgagaattagaatattgattctatctacgtaccaaattactatcaattggtcaagtcaaattacttccttctcggctcagtgcccaatcaaccatcacccttctccctactgcattgattcaagtttgcctcaatcgcctcatagttgttgggaatttggagttggtttggctgactgatatgaggccaataggatccaaaagacggaagatagagcacagaatttcaacgggcaaagacccaagagagggaggattattacggtggtgtaacctaaactccactggccataaacatgtggaggcccccggtgtcattggactaagaaagagaatttaaaacatatacttcctcgtactgagactatctctcgccactggatctaccatgaaagctatatacaaagtgcattgcccctcttttgttaacacttgaagccaaacttttaggcaaaacgctggaccaggaagcagaatgctcaatgctcgcaagaatgcgcaaaagccaattgtatctcgaaatacttgaacagtcacgaatactaactgctcaccaatcgtcgtcgttgtctttctcgtcatctaccaacatagttagcatatagatccgcctttccgtgttgggattgacttaccacttccgctgactctctgttttcgcttgttgagagcatcttgcaatgcgccggccaaaccaccttgaggggcgcctcctgcgttggagcttgtagctgatgactcgttagcaccaccgggtaccaaagctttacttcgatctttcttttccgtatccttgaccttgcgcaagcctgcgcctccgtggccgccagaagctctgatggacgccagcagatcgctgtgtccaccggcgggctttggcaagggtggtgcagcaccacctccaggcgccccaggaggtggaggcggcggcggtggtccacctggtgcccccaaaacaggcgccggaggagggggagggggcggggnnnnnnnnnnnnnnnnnnnnnnnnnnnnnnnnnnnnnnnnnnnnnnnnnnnnnnnnnnnnnnnnnnnnnnnnnnnnnnnnnnnnnnnnnnnnnnnnnnnnnnnnnnnnnnnnnnnnnnnnnnnnnnnnnnnnnnnnnnnnnnnnnnnnnnnnnnnnnnnnnnnnnnnnnnnnnnnnnnngtcggggtgggggagggggagctgccgcaggagaagacggtgcagctggcacgggtcgaggcgctggggggggtggaagtgggggtgaaatggggcctctggcgggtggaggaggaggcccagttgtaatgctcatgggcggcactttggggggcagttggggtggtgctgctgggctcgccgtgcgaggcggcggaggaggaggtccacctggtgcagggctacggctggggggtgccggtggcacagacaccttgcgatcaccagagaaaggcggtggtaccccaaatcgagattgactcgattgaatatattgactatcgtccatcggtgtcttcggtggtcttggcggcggcggaggcccagcattgacgttcgaagttgcgcgtggacgccgcggaggcacagggccagcgggctcagcgaattttcctgcgtctgcaaatggaggcggcgcgttgaatcttcgcgcaggcggagatggctcacgggggagggaaaccggttcctctggtgcttcagaacgtgttttccgtgatgggggcggcggcggtggtccccttctgcttgtcgagctagaacccgtgtcttgaggactgatcgtggctactttcggagcgggaggtgcagaaggtggcggtggaggagcagcctttggtttattctgatcctcagcagggacagactcagccgctgccgcctgcttctggtcaatccaagctttgatgaattcggaattctcagcgatttggtcttcggtaattcccatccccttaagctcatccagcaaacctttccaagaggggtcactcgtatcaaatggcaaatccggcttagctgatggtgtgattggggacagtgtcagaggtggaggagcaatctgtattgaaggcgcaggtgctgtcggcggtggtgcactgggagttgggctcgaacgatgtaacaagctgccaaacaaagaccgtcctactttcccattggtaacaggagcaggtccctggcctcgagtagatgcgaaaggagtcttagtggtctctttacttgcatgtttctcgcgctcatgcaccttcttaataaaggtcttggcctccttctcgtcgacaaaggacaggccggcgggacaggcttcgagctcgaatgtatgaaagaaggttcggtcctggttgtaagcgaagttgtcatagatctcctgatcccagatcacgcccctgccagtgggctgcatgcaacaacgcattgtcagcacatctactcttatctccaacagcagtatggaccgcttaccgagacatcgactattttaagccaaaaagtccttcccacgaggtcattgcagaggacaacagccccttgaattccggtatatgtccatttctgtccatccgggtaggcgacgtagagtcgcgcgacagctacggcgaggatcttgttggcgggtttggggacattccgcttaacagtttccttgtcggcatcactgaggatggagggcatggtgagtcgagatggtcccccactaaatggagaggggaaaggtgatagttcgaagggtggttacgtgagtagagcacacatccatggatccatggattgcagccgggcgggtatcttcgaatgatggaatagcgccaacacaccgacggacacggtagtgggggagggtacagggtttccttataatcgattgattagatccgaaggccggggtgttagagaggagccgaccggcggttgccttagagagttggagaggatgaaccggaggtgagaaggcgtaggcggggcgcaatacaccggagtgacctggccctaccgcaacaccgccataccggcacgtggtacttctcttgtactattcaaagtgtggctacactatataattgtttgatagtctttctatttgatattttgatgtttcaaaaatacaaattgatagaacattgctgacatgatcttcgtgagtgacgaggatagcgggatgcggtttagcgtgctcgtttcaatggtgttctatgtcatacaagaaggaaccattttaaagatgagctagttaactaagtgaatatgcggtgtgtcaatatggctgaccagaaataggatgtatgcagcatattaaatgtatagaagacctcgggaatattctttggactagcaatacttatctatcttgttttgactatatatatccagtatcggctatgtttgttgcaatgaggtttatattgcatttcaatcaaatcatagctaccagtgcatgccccctaagttatccccggtacccactaaacgtagccatcaaatcaaatcatattgatatgttgttcttttcccctcatacgtgtctaggcaacttctatcatgctatttgttgcaattcgaccaccgacgtcatccctcctgagatctataaaatagacatccaaccgccgttcaacacttgcttcctcgactcaccatcaccaagttacaagatttatttgttctatttaccggcgaacaagagctagtattagctagcgactactcaacaaggagctcttctatatctccaaaatgccggtcatccccgagtcgtcagacttcccatctgctcccgaaaagggaagcaatgaggccgagaagaaaccagagaaacaaacccagaaagcgaccgcggcggacttcttgtcaaagggacctcagattccagacagtaagttgggaaccagacctatataggctcgcgactgacactttgtagatatgcctcccaaggcttcgaaagaggagctcgaggcacgcgcgaaggaactgaacgagtcatccaactaagagacccttggtcaaaatttttattatctatctgtacttcattcagtagcagtttctggcattccaggcaacttgtccttgtcgagtgtaactatctatagcgggggtcatgacccaaaactagctccagcaccaacaaacgaagagtagctgcctgagacttatgaaacaaaccaaatcaccaaaaaaatatactattttttatttttcttgtcctcaaaaaggctgcgtatacttccaagcaaccttggaaggacctgaggtcgttcatcaattcattacgtcatacatcatagcaccaggacacgtgatcgcgcgacatctcattgaccagaaccctcattcctcaacgcgttaggaagtgctcccaatgcctccagaacggtccaatgtgccggtgaagctgtctctaccactggtaagtatcctatcaactcggcccaggcttcccgctaaccccccattaagcaataccagcaagagctcttcaccgaactacgcgccgaagatgagctagtcattcttgcacgaggcctggggcttctacacctgatatcaaacctcctccacttttacgatgcggcgggaaacaacctggtcctggtggtgggtgcagatgaacgcgagaatgagtggatcggagagggtatgtggattggtttacatcccaggtcggatgctggggttggaagctgatggatcccgaactcagcattggcggagcattatgctaccagcaagtcccccctcggcagggggttaaaagtgatcaataccgagaaagctacggtgccaatgcggtgggtttctcggttctaccattgtcaattacggcgtattgacaaactaccagagaaggaatatatggcgaaggaggtattttgagtgtgacatccagaatattggttgtagacttgttgtccagtatgtatgctagtataatggctcaaatcactagctgatctttttagaacttcttgatcccgagaaagtcaccgggatggtcattttgcatgctgacaaggttttggcgacatctcttgaagcattcatcatcagggtttaccgacagtcgaacaagagtggcttcttgaaagcattctcggactcaccggagccattcactacaggctttgccccgttggctaacatgctgcggaaccttttcctacgcaaggcctccttgtggcctagattccacgtttctgttgctgagtccctagaaggaaatcgcaaggcagaagtgattgagttggaagttcccatgagcgacaaaatgagggaaattcagaatgctgtcctggaatgcgtagagatcagtattactgagctcaggaagagtaacaccgggctggatatggaagagtggacgttagacagtgctttgcacagaaatttcgatatgataatcagacgtcaactagacccaatctggcatcgtgtgagcttcaggacaaaacagatcgttgccgacctgacaagcctacgagcagtccttcagtgtgtctctcatgcgtctttccctttctctatactaacagctctgcagtgctttgctcagctatgatgcggtatcttttgtgcagtaccttgatactattgtgtctgcgcatgctccgcctcccggctccaacagacataattactctccgtggcttttccttgatgctgcccatgttcttttccagacggcgaaatcgcgagtctaccaaggcaaattgaacaacgaactgactcgcctttcatcttcaactacattttcttctgagttgaacccagttctagaggaactcccaaagtggagtgtcctgtcagaggtccttgcagaaatcgaacacgatgcttacctccatcctgcgagaatgcatcaatcaaatagcaccatattgattatgtgtagtgatcagcgaatatgcacccagcttcgcgagtacattgccaccatgcatgcccaaattgcccaagggtccgagcccaaagaacatgatgatccgagtgatgacaagccttctgcagagcttatgatgcggcgtcggctgcgagactatctcaattggaagaggtctctttcaaatgtcaacaagaatttgtctcagtcaggcgaggacgataggtccggaaactccgagtcatcagcggcccagagtgcgcatcaaggacggcctcccccaaacaaacgtcgtcgagtacgtggcggcggtgcagttacctcggctgcaggtcgtgtgccaaatagcagtgtccaaaccgaagtcgaattgcccggtcaggtcatcagcttactaagtgagattcagcccaccggcgtggaagaaacgcagaaagaggaggttattatcgatgagttggaggatatggaagatttctacgaattgtatgatatggacgatctggtcatgatacacccttacgacggtgacatggatgagcatatactcgaggaagtgcgtccgcgatacattatcatgtacgaacccgatcccgcattcattcgaagggttgaggtatatcgcagctcccattcagggcgaagtgtgaaggtctacttcatgtattatggtggttctgtcgaggaacagcggtatctgagtgctgtccgacgagagaaagactcattcacaaagctgatcaaagagaagggggtaagctaccctgctgcatccttcacactgttaactaacctgatcttcagaacatggcagtcaccttgacgcatgacaaaaaggctgaagacccccaggagcaattcctccggaccgtcaacactcgtattgccggaggaggacgactggcggctacagcatcccctcctcgggttgtagttgatgtgcgggaattccgaagtgccctaccatctctgttacatgggaacaacatggtcgtaattccctgccagctcaccgtgggtgactacattctcactccagacatttgtatcgaaaggaaatcgatccgtgatctcataagctctctcaagaatggccgtctctacaaccaggccgagacaatgctccagtattacaagagcccattactattgattgagttcgatcaaaacaaatctttcacgtttgatgcgttcgcctccgttccaacaggtcccacgtttatgacagattacggtttctcatcttccggcactgcaaccaccactagcagcagctcgcttgccaacccgtctaacccaaagtccgctcagcatctaatagtgctccttactctcgccttcccacgcctgaagatcatctggtcttcgtccccttaccagacagccgagatttttgcagagctcaaaaagaacgcccaggagccagatccactccgcgcagttcagctaggcctcgatattgatatatctcattcgcttggctctgctgacgtcatggctgccactgggattgagcaccgtaccttcaatgttcttccacaagacatgctgcgagctgtgccgggtgttacgccccaagctttagagcggctgataatcgaaacggacaatattagtgatatcgccaacatggatgtcgagcagctggatccactggttggcaaagaagctgcacgtaaaatcgttgctttcttccagagaagcgtatttgattaatggaggattcattcttaatcaaatatgactttgatgcaaattaaataagttcatcaaaaaagccctgtatgtcagcaaatgcggtaactaatgtgtaacaatgtaacaaatacaactacatcatcccatcacatcttcatattttgcccaaatcagccagaaaaaaacaagaaaaacagcaaacagccgagacatccgagttctggactcttacggagtacagagtaatcaatttgaacctggtctactccgtaccccgtcagacttcttgtccgtcttggcgacgatcgtgcagatcagctaaaaacagaacagcccccagtcaacaacagccgaagcaaggacccctgagaaagagtggggatgtggatgagtccttttaaggtcagaaatattatggactcctgacgccttcaacttatcaccatgcatctcaagactgtgttgactccgatcgctttggctgctgttgtcggtgctactaggagtatacgcgatgttgagccgtgtgctcaggttagcaagtttgtggaagaggccaaccgaaaccagagtacgtcatgagctcgaaattatcaaaattatcaaaattatcacttggttgataactaacggtcgcagcaaatgcccttgtccctcatgatttggcacaccaatgtctgctatctatgccctttgactcgaaccgcgccgttgatttcttgaatcaggttcgaaagatcctcgagtttcagtcgactatcgatattttgaagggtaagtgatatcaattcaaatgagaattctttaacctggctaacctgtatctgctagatcctccatcgggatataccatgccctccacggatattatggggggaatcgatataatcatcgacaaggccaagagcaatagctataccagccaatttgagatggacttggaaatcaaccaccttatcaaaacggcccatgacggtcacctggccttccagctatgctcacagtcaatcttcacatatcaaatcgatatgcctctagtgtcaatttcaacagatgggctcgcacttcctcaagtgtacgtgttaggtatgttcagaccggtatatatatcaaaaatttgaactaacatgacaggcgatgcaaaactgcggaaggtcgacccggacgccgtctcgcctctggtgtcaatcaacggcactgatgtggctacgtaccttgaatcatatgccaatgatcaaaatctccaggattgtgatgcacagtaggtgtccttctacagccacgacattgaatcacatttaactgtcgcaggtacaatcgagtgttccccgcgccagcccgtagtgtcaccaacactcctactagtgtggatggaatctgggcttccattggagactggactgatggcgctcagctgtccctcaagtttggtaatggcactgaaaagattatccagaaaacagccacaccgagcgaaaagttcttttcttacgaaaatggcacacacctctacgacatagagtgtcttcctcgagacttgtctacagcttcgagcagcccatctggcgctgagacagcctcctctgagataccgggatttcccagcaccacctggcgtaattcagctaattcgattgctggatactactctgaattatcagagctggagaacacagcaatcatatttctgcctacgttctcatctagcgcatcagaggtcgctaagattgcggttgacttcttgcaaaacagcaccgaatctggaaagaagaacgtattgattgacctttcatctaacccgggtggatacatgtctattggcatcgacctgtctcgtatcttcttccccaatgctgctccatacacagcgacgcggttcagagcacacgatgcagctaagtacctcacaaaggcatactcgcgcgacaacagcacggacacaagcaatgtttttgcgtatcggcagatggttccacctgaccagagcacggacttcagctcgtgggaagatctctatgggccgcacgaaatcctgggaagctctgcttctagcctattagccaacttcaactacacctccacctctacagaaaactttcccattagcggctacgggcctgttccattgaacccaagcaaagcacccttctcggcggataacatcgttattgtaagtgatcgtttctcacaagaatacagaaaaaagagaacaaactaacacaaactcaaatgacagatcacagacggcgactgtgtctcgacttgcgcgttctttgtcaagctgatgaaacgccagggcgtccgcactatcacctttggcggccgtccacagaatgcacccatgcagggtgtcggtggcgtcaagggcggccagtcactcggggtcaactatatcaacggatatatcgagcaagcgaacgggctgattgaagactcagtcaacagtggatcgccactgctgacatctgccgagtggaaggcattcaatgagtccaagccgagcacgacggcatcgctccaatggagtggcaacctcaatctgcgaaatgagtatgacccggaagatagtcagacaccgctgcagtttgtttatgaggctgctgaatgtcggctgttctatacgctggataattacttgcaaagggagaccgtttggcaagctgcggcgaaggctatgtttgggagtgggcagtgtgtagagggatcgaccaagggaaagggtagtctggattcttgatctattgacattctagcagagagacatacatatcatacatagaaattttgtaaaaagatatacatacctggcctgtactccgtacatttgctgaaattgcccaggtgactgtacggagtaggagaatcacaactacgtgcagcacattggagaaatactatttaccaacctaaaccctcaactactttaggcatagcgcgacttggctgccattcgcaccgccgaattatggcagatctgttccaggtagtcacgtgacgcccctgacgttatcaatcacatctacctacatatgtccgtcaacgtccatctgcacgcgtccttacatcagcgctgcctgagagcttgacttctaaggttaacgatctgaatatcttctcgacaccatatctacaacccaaagcttgacagcccagcccatataccaacgtcacaatggatagaccacaaaaaacggaaggcacgatgggagaggtgcgaacgtcgagtcttacccaggtccacaatcttctggccccttttacctacagagacatgatctaatatacctcgattcgattaatcgtaggcaaacctgtcaatcggttctaacctcgattctacctctgcgtccagaggctcagagaccactacaactacgcccccatcccaatcatcgtaccagccgtttcttggagagtcgaacgatcttgtcgtgccccctaacgcaagaataattcgcccgcgctccctgaatgatatctacgacgcaattgaagacctaaaggctgaattagacacacataccgtcgagacacataccccccgaccatcacaatttatctgggcttatcaaattccgcaaggcctctttacccagatagaaacagaccttgaactctttcccggtgttcgaaccacgatcgcacacaacgatttcgctgtattattgaaaatcatgccgggtcgtcagcgtgaacgaatcactgggaatttccgtgttatcgttatgggccacctcaatgctatgggcttgtccttgcagaacggagatttcactgaccaaggcgccgaaataactcgcggatttctacaaagtaaggagcccgattgggcattcggtccgtacgacgcacgtatcaattcagcggcagacgaatatcctgccaccgaatatccctccctcattcttgaaactggcttttctgaatccttgggccaactccaactggatgcccattggtggtatagaaataccacccaagaaaccaaaatcgtcgtgttaatcgatgtggcaagcgacaatccgtaccgcgtcaattttgaagtttggactgaggttcctaaccagtcccatgcccctgtaaccagaaattgtccggccgaagttgttcaatgcacccagagagcgacattgcagaacggggtggtcacaggtggccctttgattcttagtttccccactcttatgcggcgagcgccgcgggctggcgagcacgacattgttctaggggctgctgatttggcgatcatcggtgcccgaccacgccctgccccttaattttccggcatctagcgaaggtgccgaacctcatcgcagcaacgacggggcggccaacaagacgatggtccctccactcggaacagtatctcaatttgttaacaacgagggaattacttgatgcctggtgggttgtctgatataaacataacttcttcggtccaaccatcaaatgagaggataatactccgtcgataggtagcaattggcttcgacgttgggcattgacctaaagataactacgcaaaggttcttgctatccgaatacgaataatccagggggccctggaccctgttatctcctgtaaagtcaatgctccttatataactacgtctttgttctctaaattccaagttgtgctgcccatgcaggcggctctatgtgtagtggccccatcaaaagcccctgcctgagaacccccaaagtttagttacgatagttcacttgatttgtctaattactgctttgaattggtctacaagtaaaataatcttcaaaaaatattttcaattctcgtggcccatttcatgactcttatcataaaagaacgaaaagaaaagcaagtcgaggctgaacagagtgaacacaccgcatgcaatgcaatgcaggaaaacaagcacacaggttcatgatgtgtgcatggcaatcattttattctctgtcatgatcccaagatatttgcacaaaggacaaaaatggtatcgacgatcgatccaccttggaacgccaatggagaaatacctagggtcctctgttcgatggcttcaagcccgtaaaagttatcgcagtagcgccagaatggagggttttcccatcctcatgcaagccgaggtgaggagcagcgtcgtaggccggggaggtggttcatgctcttggtccgttcgaacgaatgtatagagggaatcggatgtcgaaagtgcctcgcgtggcaagtagtcaaaggcagtttcggagcagatgagcgatggcactgtgtccacgacggcgagtaggaggagagggatttggcgaacatggagaataccgaggaggatgtatccggggtatccttgaggggcagagcatcgaactctaggggtagcaggggatgagcttagagctcgtcgacatcgatctccttctcgtcctcgctttcgcggtcctcgtcgaactcaacgttgtcgtccaagccttcaccaccgtaggtatcggtctcgttgatcttggcgtgttcggggagctcgccataagcctttagagaacgggcctcgtcggcggtgtacttcatgataacatcgcctttctcgtcctggtagtcacggagcgagaggagaatgatatcaccctggttgatccagaccttcttgcggagcttgccacggatgtgggccagacgcttctcgccgtcgaagcagagtgcctctaggcgaccattgcctagcattttcacgacctgagcgtactcctggccctcctccttgaagacaagttcacgcttctcgttgtcgttctcattcttgccgcgacgacggttcttaccgccctatacttggttgtcagcatgtgtcacacaagtgaagatcagtggtttccaaagtgaaaaaaatatttcgcgagcccacaagtcaccagcttgagggtaggtggctacccgagacggtggatgtggcgaggaaattatcaccaagaggaggggctggatattttgcgcgcttacctttcccttattcttgggcatagcggtttttcgtgaccttcacctgggtcaagtctctggggaagattttttccttagatcaacgaagatctgaagaggcctaatcgaggttgattaggggagtgagagtggaagaaagaaggaggtgggggttctgtgcactggtattcaaatcttttttattatgtaatcaggcactggctgcccagtggcgtcacagcgatttcgcccccgcttaactacggcaaatttatgccttgatgcctgatttcggggtagattttgaccgcctggtttgatttggcagaaaaggatgagtgtcaagcttggaagtttgcaagggcatttctgaggaattctctgaggtgttgcgataaaaggtgctgtctgatctgtccaagatcctgagtattcacttcatttacagctttcttgccctccgtgcgacccgtcctaagaagcagcacgagactgctttattcacgcaagctccgaagattcggcgcctgccgagtacattcacaatacatctgtgatacttctcttcgtggctcgatggtatctttttgaacctatatcccaaatcaccaattgttcctccgaagtgtccataggtcttcgccggctctgtttaatcaaccttaacgtgcaacccgacatgatatcaatgtgctacgactctcgttatatttcacagtccaagccagcatacccttacgaccaccggtaaacctcttctatcatggcgatgaaatttgtcacgtctacaaatagcttggtgcttcggtattggcccaaatgcaacacccctcctgttgccgcacgctacctgaattctcccacccatgcgatccggcccaaaattgtcgatctctgtggacatcgtgaaagaaacacactatggtggcgagtttccgtgtcacaactccagcaaagcaagcgggttgttcgctcttggtgcgcgcgcagagtgcgaatggctgtcgagcaggctttaagacagcaaggattggataagctggggaacccgcttgtttctgaggctcctttgcgaaggagaaaattgtcaggaaccatggacatctacattcagccgccatgtgtgacgcggaacttagagggggtccaaaaggatgcagatcatctaatatccttgcttctggatcatgaatcaccgaggaaatgacctattgtcgatgagctacactcagaaagcgaggcctagcaagccgtggacatcatgcgactccgtgagactcaatgtatattaccataacatcttgtatcatactactagcagtcgattgttggactgttattgtacatcattaggcgacattgcgatttatagcatttggggggaattagtttgcatctgagatttaaattatttcaattcctgatttttttcattctttatacctccaatttacaactaagctgtcgttgttggctccgaggtacagaagtaaatacagaagcgcgtatctcgctaaatgccgatctggcggaatcaacgacccaggtctaggctaagattcacttgacaaccaccacaacttttcctaaaccttcccctcttcctttttttcgctatgttggtttccttgacagttggcaaggtagacgcgggtgtcgcagtgctcctcacccaggacaatcggctcgtaagctcaaacccctggtcccttactccctaccccgaagatatcgacgacatgcaattctgcggaacatcaatagcaaacaaacacaccttactgacaaattctccgcgcagatcgaattcccctcagtcctccttcccagcaacattagctcaggcagcattgtcgatatcaccgtttcgcgcaaccacgctgccgaagcagcgagcgcatctgccttccaatctctccagaagcggattttaaatacgtacggtgtcaaggccccgtcaccccccatcttgcgcctccgaaatgcgacccagacctcgctcgttctcgagtgggacccaatcgacctagccactgcatcactgaaatcgctctccctttatcgcaatggttccaaggccggctgcataccccgcccgctagagacacgcagcacaaaaatcagtggtctggccattcactccgagtactccttccatctggtcctgcgaaccacggctggcacctaccagtcggagaagctgacgtgtcgcacacacaagatgactgacctgtccggtatcactgtcacaacgggtgtactcgatccacagcagaaggaggctctcggtgctgcattggaccgcattggaggcaagatgatcgactcggtccgtatcgataccactcacttcgtctgcacggaaggacggggcgcgcagtgggagaaggctgtagagatgaacattcctgtcgtggtgccggagtgggtggatgcttgcgagacagaggggactattgccggtgtgcgtggctactatctcaacgcagatcccaaggcccgtcaactcggcgtgatccacggctcgtcccaccagcgtactacttctactctttcgactgcgacaagtgccaaccagggaaggcccagcactcagccccaacggagccccgtgccagagcaagtacccgaagagcctcctttgactccattccctgggggtgagacgagtagccaaccgcaggcgcagaggcagacacaagaggttggatcacaacatgagaaaaacgacatcctgcccccttcacccccgcccaaagataaagccgaagatacagatgagccttatcaaaatggtcaggcagaagcggcacctattccagaggcgaagaacgaggagcctgaacccgaaactgcagaggagagcaatgaagagacagagaaagagcagacctttccacagaacaggcccgagggtgactccgagtcgacaaacctcggaggcacaaagggcaaaggcaaagagggcgagagtgacttcaacgaagttcctctctgaatagccccctgatgatttattctgctctatccttgcttcgcggtcaatctcttaacacccctaccctgcttttgtctcagttgtcgaccaacgtctacgactttatctagtacagttttactttgttgcggttagtggcgtttctcacttgagcgaccaaaccataggattcttacgaacgtattccgactgtgattcctcatttttttttctctgtttcgtgtttgctgttatatgtacagtacgcaattttcctaatgcagccttgcccattgactcgactgatccgatctgcctagatagctatttggagactacctaagtggttacattgcgtaaggacaccaagcctacacatgtggctatgttctctaaattggaaatatcatgaaacgtcataaatgagatgggcacgccagatgcaaggtaaatagtagcctgcaaagaaaaagaaatatcaaccccttttgagaaaccaaaatgcatggcagtctaaacaatatagaattcaaaacaaaaccagttcggactccgttcgaatttagttttcgttgcgaataacatcgtcaatcgcctgtgcgacgtaggcgacattcttttggctcactgtgcacaatgtcagttcgtttttatgagtatccgtgattgaggttccttacggccgctgatagatgctcggcctgacttgagcaggtaaatgtggtatttgtccttcaatgcgtagacttgcttgggggaaagaccggtgtaggaaaacatgccgttctaaaagaacaattagtacaaagtatgttacacatatggtaaaatccagatagcttacctgctggatgatgtgctcccaagtaccgggggtctgcagacggaccagttcattgtatagagccttacgcatggccttgatgcgcgagctcatgacctgcaagtcctggttccagtcggcagtgagctcatcgctggtaagaaccttcttcacgatgctgcagccaacacgcggacccatggagaactcgccgcgaatcaggtggcataggttgttcacaacgatgtcccgcagggtgactgaggcgcggttggtacagtagtggaacgcaccaacacgctgaccgtacaggccgaagttcttggagaagctctgtgccacacacatctccatgtccggcttagtgttaaagaagtagcggacggcccaagcgtcctcctcaacggaacccgaggcgaagccttggtaggccgagtcgaagaaagggaagagcttcttgcgctcgcaaaggtcagcgatggcaacccactgctccttgttggggtccaggccggtggggttgtgcgcgcaggcgtgcaaaagcacaacatcgccctcctgtgcctcggactcgagagaggacatcatgccctcaaagtcaaaggaccgggtttcagcatggtagtacgggtatttcttgatgggtacgtcggccagctcccaaatggtttcatggttagcccaggatgggtcggacagccacacgttagtgggcttcatgtggtgagcaaggaacagggcgccgagatggttggcaccagtgccagcaacggtctgcacggaaccaatgcgtgccttggcctcttcttcgccttgcttgccctcaaatccaaacatcagatcccgcgcgatccctaggaaaggcacgtcgccctcaatcgcagtatattcgtggcggaagagatcatcgtctcccaccaactccttctcagccttttgcacgacgggaaggggccatggctttccatcgtctgtccggtagacacccacgcccaagctaaccttctgcggatggggatcgactgcgtaggccccgttcagggcgaagatttcgtccggaggcaccggggagacgttaagacgggtgtcaactttggtcattgtgatgtatatacgctgcaatggcgattcccgggagcaatttctgggcaatatgtaggtcgcggcgagtataagtcagtaaagatcagaaccttgtgatcgcccgctgagtcaacccgatatcgccgtctgtctttttgccccacatagcggattccggggtcgggttgcttggaaggacgcaatttgcaatgccttcattttcgtttaattcaaagttcaaaggaagagatggccttcaatagtcttcaagttttggccatatgctgatgaacagcctgttgagataggttattgatcttatcttggaggacttacctctaaacaccagcatgaaacgtcatcggaggtctgctggcgcgcttgtaaatgcatcagaagcactgttattctcaaggggacaaatatgagtttttcttatgtagcaattcaaacggggtcgatgataagtgatgtgttgatgggaatacttgggagagtaactattgggtggagataaacgcgaaggtatgagtacttcttctacaacaacattctatttatgtttggctttacaccctcaatgtttctattgattccataatgtgggaaagccaaaacatcttttctacgatgtacttcatctgtctccggttatatcaagatatgaaatgaacaggaaatcaaccaaacacactagaagaaaaagcctgttgagctagtcagaacttgccagatttcgttcgagctattttcccaatcgatcctttgatatataaattgcagccggtgaggatagacgcttgaactcggagttatgctacgtaagtctctccgcttcgacggtgataaaatatattgacacggacattctgtgcatatctacggagtacatagttatgttgcagttagttacgtgggggtagactgaacttggtacttatgtattcaaatggttaccccgcgatctgtagttactaagtggacttcggtagcctgcttttctcttccatatcctattctttgaacaatccattggataaagtagccggtgccatttttcgttatcaacatggcctctcaaacagtagaagccggtgattctgctttgcataagtttcaggttccaactgttgtcctgccacttcacaacagcattcccccggagctgctacctcggtatgacccaatctacgtcgcatactataatgcatttaatgccgggcgactgcatacgcacgagatcccgattgaagagttccgcaagaaccctgcccgttataccatttcctatggccgagctcccggccctgatatttatcgcatcacagaacagaaatgtcctgtccatggcggtgaaatcaccatacggatatttgagccagcatcccagcttgacggacagggccagccgaagaagagagcagcctatgtcaacttccatggcggtggatgggtgtttggtggactagcttacgaccacgatttctgcaagcgagttgtccatggccttgatggggaccttgtcgcatttgacgtggattaccgactggcccccgagcataagtatcctattcctgtggatgattgttggacggctttcaaatgggtaggagtctcccgggccaagattttagatataaaccaggtgctaacgaggcaacatctagattcgctcccacaaagcgaccgagttcaatctagacccagataggttcgcagtgggcggcgtgtcagctggaggccagctttcggccgtcatcagccatctctgccgcgatgcagacatccctctgcgcttgcaagtcttgactgtgccggtgacagacttgcaccgggtttttactcccgaaggtgagtttgactacgaaggctgtccatatgaatcataccgagagatggagtttgcgccagcgctaccagcagcgcgcatggcatatttccaccgacaatttctaggagttcctcgaccggcggactctgacgaggtaagttccgacatgaacttgaactaattgaaaatgggatgctcatttgtctaggattggaagatatcgcccattctcgcaccgaacttccggaacttggcccctgcgttggtgtctacggcggaattggacccgctgcgcgatgaaggagaggcgtatgcggctaagcttcgagctgctggggtatctgtagaagtagatcgaattgcaggtgttccacatttggtcgctggactcgacggaattctggagggaggtcagcgatataacgagaaggttattgcgacgatgaagctgcggcttaagggatgataaataaataccataccaaaccggataatacacgatatgaccgaatattacgggcctcactgccgagcaacccgtttcccttcggtcctgccgataccgggaaatgccggcattgcgacttttctttaaaggagacccaatcctcgattccactctcatagaagcttcagaagcttagtgggaacctttgtatatcctctttcgtacagctacaaattcaattgtcacacaatgaattctacttcctcgcgagccgcggtgcgctctatggccaccctgacacatgcggccagagccacccccgcagctcgcagcgttctgtcgccctttgctacccggtctctgagctctaatacccggcaattcgttcagttcccccgccttcaatccttgaacactttctccaacaagcgttcttttggaactacagtcagaatggtatgctgcttagagggcgcggtagacaagcagacaaactgatgtgtgtgacctagtctgttgaccctcgtaccgagagcgatgcctttggtgaaatccaggtgagtgatattggcgcagcaatggtgccgcacagaactaatggggatttcaataggtccccggagacaagtactggggtgcgcagacccagcggtaagacgacccgtgaaatcgatatgttacaagggaagaaacgaacaaggtcgctgatggatgcagctccctgaaaaacttcgacatcaaccagccccaggaccgcatgcccgccccgttgatcaaggccttcggtatcctgaagggtgctgctgctgaagtgaacatgaagtatggccttggtatgtgaagctttgcgtaatcagatatcgtcaggttattgacttgcataagaccccaagattggcgaggctatcaagcaggccgctgctgaggtcgccgagggtaagttgctggaccacttccctttggtcgtctggcagactggttccggcactcagtccaacatgaactccaacgaagtcatctccaaccgtgctattgagatcctcggtggcaccatgggctccaagaagcccgtccaccccaacgaccacgttaacatgtccgcctcctctaacgactccttccccactgttatgcatatcgctgccgttgttgagctcgagcagtcccttctgcctgccctcaaggaactccgtgatgccctccaggtgaaggtcgacaagttccaacatattatcaaaattggtcgtacccacttgcaggacgccactccccttactcttggccaggagttctctggctacgtcgcccagctcgaccgtaacatcgagcgtgtccagtcttctctccctcacctgcgcctcttggctcagggcggtactgctgtcggcactggtctcaacaccttcaagggcttcgatgaggccgtcgctgccgagatcaccaagctgactggcaccgagttcaagaccgcccccaacaagttcgaggtgctagctgcccacgattccatcatcgaggcctccggctccctgaacaccctggccgcctccctgtttaagatcgcccaggatgtgcgatacctgggctctggccctcgctgtggcctgggcgagctaagcctgcccgagaacgagcccggatcttctatcatgcccggaaaggtcaaccccacccaatgcgagtccctcaccatgatctgcgctcaggttatgggtaatcacgtcgctgctaccatcggtggcatgaacggccagttcgagcttaacgtcttcaagcccctgatgatcgccaacctgctccacagcgtacgcatcctctctgatggcatgcacagcttccgtatccacttggtggagggtcttgaggccaacgagggacggattaactcccttctccacgagaggtatgctcttctgatccccccccttacttttgatggcaaattctaactgtatgatagtctgatgcttgtgacttgcctgaaccctgtaattggttacgacatggcctccaaggtggccaagaacgctcacaagaagaaccttactctgaaggagagtgctatggagctcaaggctctcagctccgaggagttcgacaagcatgtccgccccgagctgatgctggctcccaaggagttgtagacgaacagcagtgctgtcctgtgacattatagaccatttccgatagcatgtgtatactgaaaagaatttatgtttgatcgctttgtgttgtgatgcgatacactttttttgtatgttgtagatcctcaactttctttggggttataaatagcacgatcgcgaagccgatcaagaacactagtaaatcagagttgccgagatcggtttaatactagtatatccaataaccctaggagtttttcaatgcagaaataagcagattatgctaaaaaaaaccagacagaaagacaaaagaatccactatattatacgaagtatgtggtattaatagaaaagcccccttagtggcggtgtctcacctgcagggctgtacggagaacggagtacctgaacccttcgaagtcaagtacttatttcccatcttgaaaagttcgtcttttcacttcgaaactcttatatctctcctcagttatatcaaagttcacctcagcacattaacttcctcaattccaagtccgccgatctcccccggcccctgataaacaaccgccctcaaccctcaaccctcaaccctcaaccctccaaactcttcaactttcaacattcccactctccaactctcactgcaaaaatgaccgcacacgcccttccaagcaccacaacctccgaggccgtaaagccaatcatgagctcaaccgttacctcagtggacgagacggtcaccgacggtcccctcttcccctccaccctcatctcccctgaagtgatctccctcttgccaacagactacacaatccggccaatgcgccgctcggactactctcgcggctatctggacgtgttgcgcgtgctgacaactgttggcgagatcaccgaggaggcatggaaccagcggtacgattggattacctcgcgcaatgatgagtactacatgctcgtggtctgtgatggtgcagaccgagtcgtcgggactggcagtctgattgttgagcgcaagttcatccattcgctcggtatggtcgggcacattgaggacatcgccgttgagaaaaatcagcagggcaagaagcttggtttgagaattatccaggctttggattttgttgctgcccatgttggctgctacaaggtatgtgtttttttatctcttacgtctatacttatcattgctgacttgttgtttacagagcattcttgactgttccgaagtcaatgagggtttctatgtcaagtgcggcttcaagcgcgctggcctcgagatggcgcactattactgagtgtttcttgatacaagttttttttttatttctcccgccttgtggttcacgccggttgtttgatatagcgtttaggtcgttttgtccgaggattcggggagtcgccgttgcccacgagaaacatgcgcaaaccatgcgttggttgcatttgaaccccaattgattgtcattggtatggcccttggcacacaacaaggcccaattgggccatttgtaggattttgcatccaccctctactattggcaactcaattgcgcaccgtgaaagtcctaaggctggggaatgcttggtctaccaatcgtgatcatgatggtgcttctgccattgcggcgatccccgtcttagcttgtaacactactgatgggtttgtattatctgctttctctcgagaatttgaaattaatgcattgcggggatggagacctagatggtctgaagcatagatgtgcgtgaaacatgacaattatatatcattgttatccaacttgaaaaattattgtctggtcagaaatagaaggttcggtttaactatttgaaactaaacactgtttgtttcattcttgctttgtctccaggcaccctatgttataccttccgtatattcaacgcgaaaattttaggacaaaacaaaataagaaattcaatttagatctggaggtagaatctggattacttcgttgacatccgacagggatacatatctagcaacccatgagtaggcctggcagacatgataccccaggggaaaagcaagacactttccattgctggagactggataagaatataattttaatactcgcatgggattcattttttgattcctttgttcccatttttctgcatgaaattgtattgcataaagtatttccagaaacaaggtcaaggcccaaggccagtcctcacagacagtactccagctccgatgcccgtaagttccatcatatcgcaaccatcacagcactgctcctttccgaacacctccattcccaactatttcataaagaaatttagcgggacttggcggcgaccttgggagcagagcccttagcaccctgcttgctctggatgcgctgggcaccgcccttagaggcggcgatcttagccttctcggccttcttggcgctggcggaagcagccttcttctccttggcgtccttgatggcctgcttgcgagcagcctcacgagcctcggggcgttgggagcggcgctccttaatcacatcgagggaagcaccgacgatgccacgctggttcttgacaacacggcgggtgcgcttcttggcgacctcctatatatacaaaaagataacccggtcagcaatctgcagtcgcattctccatcatttgatccgaataatggtggtgacgtgataattcctgctcttgctccgtttcatggtttgtgcgtcaccattcaattcggcctttgtccctccacacaatctaacaataatccaaggagaggggcgaccgacctcagagatacccttgcggtgctggcgacggaagagaacagtccatgcgatgcggcgggggttcttgcgctgaaggaaaagggactcggactttccacgctggaagcggaagatcttgctgtcgccacggacgaatagcttgccctaaacattgaacatcaaagattagcttctagcggcaataagaaaacggcaaaattcatgtgcggtagttcggcaagatggagagcgacagttttgacgtcgaagagtgaatgtcgaatccgtgatgccgttgttccctcgcacaagaattcccccccccaaaagcgacgacgggatttgcaaacgcaccttgccagggtagatcttctggccgctgaaggcgtcgtcgtaagtacgcatcttgacggatggagatgcgctgacgggggtcggttggcgttgagtggttgtcgtaaatcgtggatcgcggtgatgttactgacccaattgtggtgcgggtgctcgctaaagtgcgacacgtgactacctctgccctttccgggtcgacttatcgataaggtcacatgatatgtctcttttttctagtacttcgattgtatatgatctctgatcagaatagttgcataatgtagttaactagttaactagttaattcgaatcgtattacatatgcttcaatttatgccttattaagagtgcaggtggaaaaaaatacatgaaaagacatgaaaatttcaaatttcaaatttcaactaacaaaaagcgcaaggaatttggaattttcacagataaactactcctggccctcgatgaagctgaatttccttcgagtctggactatagatgtggctggaaacttttgtggtagagcggctcaagcgaagtatgtgtataccgtctacgcctatacagctggagtaagtatcttcttcaatagtcctatcagagttcgatattagaaatggatgaagttgacatatatataattctcaaggtgaggatcacggctgtgcaacaagcgatatagtgatcagtacactgcgaggactgtaagtgaccggactacattagatgtatgatagcggatgcgttaagaatggccgatggaagtcaaacacgcgggcgaggttgacggtctgctagaaaaagccagaataacttgagacaagattaatggaaggagcagataatgtgatcctactcagagcaacagggttgcctaataacaaacgcttgtaattgaatgcctgctatcgcaaatagaaagggttatctgcacttcatggtcacatagcaccaacggacttagtccatagcatgtgtccgagtccattcctttgccgtttggatcgcagcaggctcatcgtccttccatctctgagcaacatcgttggcgagcgggtcatcgggattcggggctccgagcagtgcctgaatagatagtagaatcgtacgaatctggagagctggagaccaattatctggaaaaaaagagaaacactattagacatttccagtttgagaataaatcgaattgtggcttactcttcaagacatccaaacagatgcgacccagacgatcgatgttggggtggtagatcttggtcaagaagcgaattttgggtggggtcataggatagtcgtctggcaggaagagctcaagtcggaagataccgcctgtatatgtcagtacttcaattgacaggaagattttgtaagggcgagcctaccctcatatggagattgcgcaggtccgtgaattgagacgtcgaaatagcggaggttatcgtcatggggtacagcattaatgcctggaacactgtaacccaagcaagacatgttagctgccatgcaaatgaccttttgagagagaaaagctgcttacggctctgccatcagacgttccgtctccttaatgattctcttgggtaaagccatggcgaaccggcttatcgacacgcgtatagacctgatttgaggagactgttcctaaggcagaccaggaactcgcacacttttgacgttgagtgggatcacaatatgtaatcggaaaagtcaacagagaagagtaaagcgcaagttaaccaaaaaaacaatccagatctcgacataaccggccgaggggctcctgcatggcggggttatttcgcgtcccgtatacgagatcatgtgatgtcataatcccacagcgacagccacagccacagcaccagccacgctcttgtgcttatcgcgttatcgcaactcaactctccacatgtgcagttcttcgcgacaagtcgaggatataagtctccaaccatgaaacaatgatagcgaatgccaatgtgaaagatgggaacaggtgaatcactcctaaatgcatatatcgtcttccgttggatgcatggatatacctctgactcccccgttcatgcaagatcgcggcccgacgaacaccggagattaaaagagcggcaatcacagtcaccatgtctagctcgatggaaccgaggcctctcacatcggctatggagagcccgacgtttgaagaggacagctcctttcatgtagagcaaccggtgggttctatgtcaatatccccttgtggacgcgatgtcgttttagcatccaaggagggcctacatgtcatcgacctagactcgccatattctccaccgcggtatctccctcaccacacaccatgggaggtagctgatgttcagtggtctccattcgctgcacgtgatcagtgggttgtcagtacatctaaccagaaagcgttggtctggaatttggctatgaagacatggcagaactccatcgaaattgttcttcacgcccattctcgagcaattaccgatatcaatttctcggcattccatccggatatcttagcgacgtgttccgtggacagtttcgtgcactgctgggacctacgtgctccctcgcgaccagcggtctcattctcagattggtttactggcgcaacgcaggtaaaatggaatagacaagaccctcatgtcattgcaagttcccatgaccggttccttcgaatttgggatgaccgcatgggcgcctacccaatcaaatcgatcgaagcacataacaccaagatctatggagtcgactggaatcgtgttcgacgcggtgctgtagtcacatgttccttagatagaactatcaagttctgggactacaccaacgattcagatgttcctgaaaagcaaattcacacaccattccccgtgtggcgggcacgcaatacgccgtttggatggggtatgctcgcaatgccacagagaggcaacaatgaccttcacctgtacagccggcgagccgcagaaggctcaaatccagaggacgacttaccgttggtacatagttttcccggacacaagggacaagtcaaagagttcttgtggagaccgcgcggaggtgtagcgaatggaattgaccatcgcgaatatcaacttgttacgtggggaacagacagggagcttcgtctgcataaagtcaaccctgaaattctggcgcgcgtcgggtacgaaaagggcaagtcttttatttctacgcgaactgtgacacgactcggtgccgtatatcggagtttccgcgacgtgaattcagatttggatctcgatgacgttgacgtggcttcctctgttggccaccagaaccagaatatcgcggcaggtactgggatgaacgccattactgttccgtacgctcggggttggataaagggaggccatattgatcgagttggcatgcaacccaggtcaaatttaagagccgatacaaatccaattgcttggatgcgcggtgtaaagatctcaggctgggacattgagacattaggagatgaaatcagccaggttggtgaaaagttcactaaggttgcatttgattcagttgatgtccgacaaagaaagatttccatctctctaaatgggccctggggtactgacggggcctccttgtttttgaaggttgatatcaagtttccaacgagctatcccaagacggctatcccaacctttgcattccaaaagacggcagccgtcaccgatgagtgggctgcgaagactaccgctgaattgcgtacaattgctgagacctacatgtctcggaatcgagggtgcctggaaggtgctgtgcgttatcttttaggcgaaagcagcctggaggacagcgtcgcgtggatattgggtgaaactggcgataccctcaagtcccctaacaacggtgaactggaaggtgaatccagcgacgaggatgaagtcggcatgactcagagccaagagctggggatgagttctgagctactccgccctgtcaatgccaacgtcatggtgcctgtggccaaagtatgcggggcgctttgggcaaatgacggccgcctcatttgcttcttcccgccgaaaccaaagaaggataaatcagccgagttgttcgagaacatgggcttcaaagagatgactcgttggtctcgaggcgataaagtttttgaaggcttcggccggttgcataccaactcacccggcccacgcggaatcggaacgataacgagcacagatgatggtacatcggatgattcggacgagtcatactcggatacatcgagctcttcgggctcctctgacgtcctttctgggctaccgacacctttcccagcatcccgaacatggcgcagtgccggcagctatggcattcaccggccgcgatcaacagataattctcagcggtctactggaggtggtgccacagtcaaatcagaggcaccccagaatatcgtatctattcataatctgagtgatatgttacccgtcaagcgggagttagcgagtcaataccgcatctgtggcaaagggacagatgtatgcgcccataacgcggctgttgcccttgacgctggctgctacgaattggcccaaatctggggtctaatcaagttgatattgcatgttcgaaaatgccctggcactttgcctgggtcagggctgtcgcaaaggcgtacgcgcaaaaaagcgggcagaattggtgatcttggaaaagatgggctgtatagagacttgacgggcagtgttattcgctggggtgaccaccctcttggcagtcattggcttgtccctgctcttttcgaacactttgagcgcattggggatgtgcaaatggtggcaatgctgtcgtgcgtactactggaagccaaccaagagggatatttggagaatcagcgagccaaaaagacgcctgggagacaggatttctcattagattttcctcctgtcccatccgcaatttcaaccaagccaccactcgcgacgccagcttcatctgttctcaaagaggcccaggctatgcccccgccccagacctcgacacgctcttctagtgagatctggcgtctcgattccactcccccgtattccacaggcaccacgcctccattcatgtcccgtccacgaggcatcgctgctgatcgaaaaaataccacccacaatgtgtccatggctgcatcgcctgatcaacaaacccaagcacgaagtggatctgggtttggatcggtgctggcgtcctcattatctcgttcattcacattcggaccgtcatctgcgtcaccgccgacaactagaatggacaagaaaaagccgactcctcacaacagcccagttgtggcagccggacaagtggtgagtagttctaatcttgatttgagatgcctgcaaagtttgatctgtctgacctcgactgctctctagtcacaggctcagtccgacaccgaaagcgatcaaccaacggagcctacaccaccacccgcaagattcaaggtcacatacaagaaccaaattgcatttgaaagcgacggaccagcgcaagactcttttcttgacagagatgaggaattgctgtatcgatcataccgcactgcttatgcaaacttattatcgatttgggaccttcctgtccaacaaagcgaggtgacaaagattggagctgtggctgatcgagtggacgacttgacttcaagccattactggaacagcactagctccgaagagaccgcattgcaagatccacattcgaagccaaactctcaaactcttgacttccagcgccattgcgccagctgtggccacgcgttgcagctctccgtctttaataaggaacccctagccccgaataccccctccaagcgaaatcagcgcaaaccatcaggccgccgatgccctaactgcaagccccggcagccactgccaaccaaactgccctgcgtcatctgcggcgaggtgatcaacggtatgctgattccctgtctgagctgcggacatgtgagctgtttcgactgccaccggcgatggttccttcgaccggccgacaaattcgacagctcattcgcccatccagaccagaacaagttccttccaacctgtccgacaggatgcggctgccagtgctctgaacacattgccgttgatgtccccatgcccttgttagagccggtatcatcccctggtactaaagaatacgcacccatcacccagcacagccttgtacaggcgaaacactctcatcgtcgacagtctgagcccgtcggcttggtttctaaccgaaaagaggatccgcgccccaagggcgttggccagctcgaacacgatttggatgtgtggcaggactcgtcgccgtttgcatctctggcgcgcggtcttggcggtgggctgagtcgtggtttgcggacgaaagaagatcggaagaagaacaaatctgtcgccatggaatcgaatttgaggaattcttgatttttcgaggttggcgttgaactgtgtctatgattttgcgtatatccattgcttttgggggaagactttcaactacaaacaacttaattggacaatctgatccatgtgatggcactatccatattcatccgatgtttattattgttgtatatttcgaaagttccgggtatccattctaaccttcaatccgtagtataaatcttcagtatggaggttgataatccccaggacttccgatgcaagacctacggagaacaatataatatattcctgcttccacttaagagatggtgccaactgtgtctgaatatggttggatgcttgtcaattggcttgcccatgatctagatctcgattgaggcgttaagcacggacgactaatagtccattatcaaagcagcgcaccaatcagaacgaggaggtatagttcctagctgtactgacgttgtacaacaaattaaccttaagacaactgccttttacttagataagaaacggagagagataaaagaatgacctcgtggcttcattaaaagtatttcactcttcaggtaacagagcaagcaacagggcgatctaaaaattcggaaaaccgctgaaagcagaggggagaacaatgctggatatctgctaaacacaaataccgcagtccgactccccaatcacccatgaaacaatgcgccagtccatttacccagttccagtcttaaagaagtgaatctacaactgcttgaggacagcatcggcgctggagagcacgaggctgttcttggcggcctccttggcggcgtaggtgaccttaccgtggtcgataatgatcacgtagcggtaggtgcgtccctcctcgtcagcccagccgatgctcttggagaacttggcgtcggggtcggagaggaagagctaaataaaagacaggagtcagtcaattgagtccgtgaatttttggggggaaattggtatgggtgggaagaatgatagatcacatacaatatcatctccagtgacaccgttggccttgccccaggcgctcatgacgtaggcatcgttgtaagcgaggacggcgacctggtcgacacccttggcgcgcaattcggggagcttcttgatgtactcggggacgtggttggcggagcagacgggagtgaaagcacctgtagagcgggatggcggtcagcgcgagaacttgcgcagaaggcctagagaggaaggaggaggggattgcattaaagagcggtcacgtaccgggaagagcgaagaggataaccttcttgttggcccactccttggaggcgtagtagttaatggggataccgcaagaggtgatggcaccagcctcctcagaccaggggatgtaactgttggtagtctgttaggtggagggacacaattagaggggctagctcaattactcacgagaacaccacgtcgtcggggaaggcgtcaccggacttgaaacccttagtagacattttgaggatggaattgagtgtttgagtacggaagagagagaggttaagattgtggatacaagaagaagaggggaagagaagaagtccaagtatttaatatcacggctgacacatatcggcccatcgggactaagtggggactggctctgtaccttacaagagaagtgaggtgatccgaagaagaaagataccgaaccacatggattatcaagaaagaccgtcgagactgggcgttatctgatgtatattattcatcggcgaattgggcgagagatgagtcagcctggatcattggttacggggagggaacgtgtcggctattaagataagttgcctcggatttagtattcctggctgttcctagctgttctccggggttcttggagacacaagtccatttgtgtcattggccaaaaatgaggggccgaggtgggggatgatgttatggagtgcctgaaatacaaggcataaggtgggatgataaggtcaggtgatatacatgcctcaggcctacttttgtcatcacgtcacattaatcatatcaatccattttgcgagaaattagtaaacattctggactgaattctttgcgccacattatcatacccctagctaagtgaactccgcatataccgccatttcaaattcactggtcaattcctcgaatctggcatcagcctgtgatataacctgagtaaacgtcgcggccgctatacccttgacccagccaatccaccagaagagattgggtcgaccggcccattgtagcgtgcccgccgaacgtttcccaggaatggcatccgcgatttcaatacggccggcatccatgtcaaccgtagagcgtagggacgcgctggttcgtcttcgaggcggggctttttggtaggagcgggcccatcagcagctcctgtagatcactcgagccaatggtctgtggttagaagatttcatcgacgctggctttggagagtatggatccaccgtccgcgagcaccatgccgaggaactttgtccagtcgcgcggtgttgaccacagaccgtggctcccagacgttagatcgcataaactcctcgagggtggtattgttcattcgtgcgatggcctcgccggcccagtcggtcccagagccatacatccagccttgtccgggctcaaagaggagtggataggtcttcatgatttcctgtggggtgtcagatgcacatcgatacttgtggcgtacataagaaaaagatttacaaagtcattgtcaaagacgctgttagtcttgccattctgtctcgcccatctcgccagcggaggatttgaatgataaccacagccactttgatggctcattagcaatcgaagtgtaatggtcttagtccggggttttatcaagcatcggccctccgaaccgacaccatacagaaccgggggagcacacagatccggaaggattggagctatatcatcatcgagggagatctgtccgcgatcgacacaaatcatgatggcgactgtggtcatgagcttggtgagagaggccattccgtataccgcgtcaaagtcaactttcgtactggaatcctgtgacaatgtgcctttggacagtgtatagagttgttcacctgtgatcgtgatcagtgagtatatccccattcgagatggaaattgtatatacgtacccttcttgttgacgactgagcatacataagaatgcatgactggctttgaatcggcaattgctcttcttactgaccgagagaacttttccatctgagatccagccgaaccactatctataccactggaaccattcataccagtggaaccgttcacgccattagacacaagagattcgtttggagattcgtgagacgtgccacccacgataaccagggctgagatttctgccgcagctgccttcatctcaagggcatcaaagatagtccctgctagactcttgggcgagcacgagggagccagcagttgcaaaaatgacatgcccacaccgaaattttggctcagccaatggatcagctcgctgccggacatactatcgagaccaaaatgagaaaatggacggctgatatcgatgtcctcgatggagatgaacatgagcttggccagccgctgtgaaacagcctctgccagtacgatgactgccttgtcgcggtcatcagaaatttcgggtatcagtaggtcatcaccactggcatcgactatcacaccaccgctgctgccggcagctttgcgcgactcgagtgttgtgactagcagcgctgagcggcgatcctgttctatgcgcgtgacctgaaccaagctgaggttgtgcttggattactcaactccagtgagaatgtgaccctgcgtgagactgtcaaagtgctttgacttgagctgcgggtgcgtgaagcggttgaagtgccggataaactctgactcttcggcttcaatcagccccgaccgcaacaggttctcggcatactcggggttgcggttcagcgtgcccacgcctttgatcggccccagtgagactgtggctgctggtaggccattgctgatgcgctgccgttctaggttatctagcaccgcgttggatgctgcatagttggactgcgagatgtgaccaacgtatgtgactgttgagctcgtcatgaagaaatcgagattcgcgttgacattaatggtggcattatgtaggtttatggcgccgtttaccttgggacgaatggcagtgttgaattgttccagagtcatagagtcaaagaaagtgcccttgataatgtcgatggggccttctccatctcggtaatatggaaagtcttatccagtctaattgggtgaattttaccttctcggatcggaggagcttcatcgcatctgccaaaagcctattttcacatgttagtgggctccatgcattatacctgaaataatgtttgggattcttgccgttcggcaattctcagtttctcctccaggacaaagttgagatcaaaggagaagaaactgatgctccgatcaaaagcattcagccccatattgcccttgtccaagacgtttccacgtccaacatcaataagccttccacatggtgctaggcattttaagctctcgtggaacccggggccagagatggttgaaaggacaacatcaataccgcgacatcgtgcctgcttcagtatttcatccttgaactctagagttcgggaccagaagatatgatttgcgggaattccgcacacagatgagatagtccttcttttgctgtgttcccactgtggcgtagatttcagcccccacgcactcggcatattggatggccgcaagccccaaaccaccggtggcagcctgaatcaacactgtttcgttgacttctaaatgggctagatagtctagcgcatatattgcagtcccacaggcaattcccacggtagccatctctacaaggtcggcatcattttcgagtttgaggcacttctgtaccgggctgcgaaggaaggtgtcgtagtatccgcgctccaagcatatgaccttgttgccaggctggaggtgagtgacgtcctctccaaccctagaaataataccagtgctctcgttgctcgacttgacactttcaaagttgcccattgcaatgacatagtcctattatggtaattagtcgccttgaatcctgcgttgcacggtagggatatcgtgaacgaaccttcatattcccttcatattcaatcccacagccttcacctcaatctcaacctcatcgacgtcaagtgcaatgtcacatgttggtttttctcggaaatacagagtatccaaaagacctggagtctctagtgccacctggacattaccgaaagttggaaaatcttgttcatctctccctgttcccgtgtctagagtgaactcttcgttcagctccatatcggggatgacacgatatagatgataccgtccttgaggatgaagtccgtctcacacgtcgctctgttggcggctgtgacaactgtagtccagacatccgtaataggcttagcgagatcaaatgacctagcggagtcaaaccttggtccatgaaggttatacatgtagctcacgcggttgctcactgttgtcctgcccattcctagaatggccacaccttcaatactctcaggctctttgaatgcaagtgtctcatagtcactggcaaagttgcccacatacacaccagtcatgatgctgtaaatatcttcgagcgttatgcctccggattcaagacatttgaaacagcactcgtcatgccaaaaaacccaccatcgaaatcctccagtttattggaaatacaataaccctctgtgtaccgcatattccctgggcgtaccttttggtgattgtagaaagcatcggcgttgaaagggtttcttgggaaagggccgcgtacgagtttctggctcaccaaaagatcccagaaagatttggggtcctggacgtcaccaggaagtcgacatgctgatgaaaagagataagtgtcagttgagaatggatatgaggtatgaaaagcgagacaggggcgctagaagagcaagggggcaacaggatagtaacaatatgatgacttgcccattccaacaatggatctcatttattttcggctgccgtgccgccttccgggattttctcgccacgaagacgctaaacgaacaacgtggtatttggcccaacaggatccgtccggccttgctttccaaactagtatgcaaactcgtcgtcagccaagaaagctttctctgggccgctctaggcgtccccaagaaccagctcgccatgattgaaagcgaagctgtcagtggccctaacccgacagatcgcaagacccgctctcacgcgatatggaaatacatggttgacacctttgatccagtcgccgatcagacgcatatcggtgctgacaatccctcctatcaggtctgcatgaccggtgccttcacccgcaggtgtcacccggattatctccctaggaaggcgcatgccaagctctccagcccaggtgctctagacggtctgcgaatccacacagacgatgtcaacgaggtccttaattacataacccccgacactgaccgtcgccgttgtcatggacagcatagactggttcgacccgagcgccgcagccgcagcctctcagagtactaaattgaatcgcagtctaaagatgggtgatcgtgtaattctgcgctcctcggcactcgtcctttggtatatgaagacgttcgaggcccacggcttttcccccaaacgagttggtgcgcgtataagtggcgcctgcatcgaccgcgtcaacatgtatgcgtcatgttggatctgcacgaaggtggagaatttgggctcgtcgctcgagatagaccgcatgcatggcctgaaaattaggagcatgtctactgaggtctgaaatatgtagttcacatacctagaagtgtcagataacgctagcgttgcggaacgggccgaccccgctttaccatcgtcagggggaatagggtgttttttattacaatgcatgaccgtatacggagtactagattggtaacaatctttcattgaactaattcctgtctaggaactatggcgacaagaggtctcaaaagaatcattatatgacggcaactacaaatagtcaactagttaaagcgtatgcttaaggcagaaattgcaaggcacacccctactttcatttatccttcctttcttctagtagtcatcgcacaatgttctcctctccagcaccctattactcccggtgaaagactttgctttcgcagacagggctgtcggcgcccctgctgcttccgcttcaaccccccccctctcttcattagctagttaactaaatggtctccttctccttttggcaaattttattttagttcattttcctaaacactaaaagtataatgtagtacgtacatatgcatagcctgttggcaaatgacttgcgacgttactacatgtatgtaggagccaaacacatctagatcaacaccaataaaatctgctcctagcatccgtgtctactgtcagattagaggccttagctatgtagccatctgtcaataaattccctagtgatcgttgtgcgtcaagagatgggtaagctgactgcagcgggaaggcttcttggcgggttcagccaaattttggggcgacaaggggcattggcaatgtctcggatctcccgtggccgtcttcttgaggtccacagttgctgccagtgctggaatatcattggtggcctgtcaggcaaaactacgccaagtagatcggccccgggcccgtacgtgcctcttaacggttttcggacaaagatcaacaacaatctcccgtggagcgggtttggggatcgggcttggggaccggatttcggagttgaagtgtaacttccatacccatgccctaatgtcactgtgatttcacgacatatccataccatgacaggaggagttttccgtcgagggaaaagcgatggaaaagtcatctccgacgaccgaaccaactgtacgagggacccttcccgcagcagcagaagaacagcaccaagaacacgaagaagaaccagcgcaatttaataatgccaatttcactccaaagaaaacatggcgcttctgggccgtgttcccagcactatgcgcgacaactttcctctcggccctcgatacatccattctctcaaccgctcttcccacaatcgcccttgacattggtgctggcgaatcgtacatgtggattacgaactcatacatcctatcatcgaccgttgtcctaccattgttcggtcagacggcaaatatcttcggtcggcgatggatgctgatcatctcggttgtcatatttgccttagggagtggcatggctggtggtgcgaagaacatcggacttcttattgcgggacgaacaatccaaggcatcggtggcggtggtatcaataccctcgtggatatcgtcatttgtgacctggtccccctccgccagcgaggtaaatatgtcgcgctcatggcagccgtgtgggcagttggaacggtgataggccccgttctgggcggcgttttcgcccagtatgtctcatggcgttgggtcttctacataaacctgccactttgtgcagcgtcacttctattgttagtcctgttccttcgagtcacacacccgcccagcagtggtaccgtgtggctccagctaaagcgcgtggacctcgttgggaattccatccttacagctgccgttatctcaattttgctcgccctcacttgggctggaacaacatacacttggtcttcgtggcgagttctcttacctcttatcctagggctcggggggctctttcttttttacggccatcaaatgtcacggttttgtgctgagccctcgattccgctccagttgttctcaagcggaactgggacatgcgcactgtggattgcttttcttcagtctgtcctgctgtactgggtcggatatttcctgccagtctacttccaggctatccgtagctcgactgccacagaatccgggctatacgtgcttcctattactgccgcaattgcgcctttcggaatcatcacaggagtgatcatcgccatgactggcaaataccgcgtcttccacttcctgggctatatattccttactcttgcgagtggcctcttttcgctcctaggtgaccactcacctgctcgcgactgggctggcttccagattctgttcggggctggttctggtatgattttctctagcaccctacctccgattcaggcatcgctgcccgagtctgacgtggccaccgcaacctccacctgggcatttatgcgcagctttggttgtatatggggtattgttgtcccaaccaccatcttcaatacacgtgtccaggagctgctgtatcgtgtcagtgatgtgtctctgcgtgcaaagcttgccaatggcggtgcatatgccatggccagtgaagggttgatgcgtactttgcacaataccccgaaccttatggcggaagtgctcagtgtttatcaagatagtttgaaatgggtttggtggatttcgattccgtttggtggtatcgggttgcttctttgtatacccattaagcagctggagctcacggaggatttgcacacagagtttggattacccagcattgcaataagtagggaagggtgaaactggtaatttacttttactatagatatttggctccaaggttttgatgttcgtggtctcaagatttggtggattgcgattgcaaatagtgtatttcttttcttactggatataacgtttaatatgtatattatattggaggctgctctcgagttcaatcccaatgatcgaagcagtaatcccgacatccagttacccattccggttgacccccagaatagaaggtcaatgccttgtatcattaacatggggtgttgtctccatcaagcgagccaaagtaacagcttcccgaagcgcccgtccaacatgcccacgcacaccagcctcttccatcaccatcaacccaccaattgtgcagccctccgaggacgtcccttgatccttcaacagagcggggtggatgccactctgaagcatggttgccgtcccttgcatcgactgaaagatcatggtatgagccaggtcccgtggcataccaaccgccactgcggcatcaatcattgcgtcgcaaataacagcgaaaaaggctggcgtcgagcccccgacagcggtagtagcattcatcaacctcgggtcaacgtgtactgccttaccaatttgctcgaagatcgtcgtcgttatctggagatatcgctccggcaatgcaggctccgatgtttcaatagccgtaagtgactgagatacttgggctgcgatgttcggcaacgtgcgcaccacccaggctctaccagctgtgttatcgttggtggttgggctgccgtatattgtgatttcgagcttttgtcttgtccagccggctgcaatgctgatgataagcttgtcagtcaaggcttcgcggagcccaggctgcaccaggatggcctcgatatcggcagggtctgcgcctagaattataacatcggcagtttgtacagcctgtacgttgttgccgcgagaaatgcttattttgtccaaagactcggcgaatcgttcggatagtcttttctccgagtttgcactgcgcacgcatgcagtgtatcgagcaaatggtaaatctttagacttctctgtgggtgcattaaccaagccgtctaggatggcaatgcccaggttgcctagacacattagtcgacgtactttaccctatggttgcacactcaccacagcctagaatgcaaagggttccttgttgaatgtccattgtttgaatcaaccgaagaaaatattagaagggaacaaaagcaaacgcgaacttggaattttgaagatcggggacgcttccgagtgtggagaaatccgtaccccgccccaatcgaatccgatgagcttcatgaggttcgggtttttaagatatttagtgcttgttcttggaaagctatgcttatttgcatttgtttctcctacactgaccttgacgcggtagctgaatacattagttagccttggaagtgactacaagtgttgttagtaccatccttctatgaattctgcggttgaaaacttcgagaactcaaaataagcattcagtccataggttataggactcataggaatcatacaagttatagaaaggcataattggagaaacatcgggagtctccccgattccaagtttcccctcagctcttatcggggcacttttctccaactccgcataatataactcttttgggggaaatgcggggagaatactatatcagccgaacaatagcccacgggagatgcagttatttacttcatcatggtttcgacagattctattattgttgtcggcgctggtgcttgcggcctctcggtagcactgcatctctccctacgaggctacacaaatgtctcggtattcgcagaagatgattatatccctttcggagacttgacaaatgtagcgtgcccctaaaagctgtttattttccataacacaaagagagaaagaaaaaaaaatagaataattactgatggctcgattgaaatataggtctatcgtgcagcacaaattgcaggcgtgcgatttttcctgggacaacaaattgaccaaatagtctacgtgagcacgttgaccgggaaaaagagcgctggtattcgcatgaggaatgccggatttcatccctcgtcgctcatcattgtcgaaacgggggctagggatggcgattcgtccgaaattggccagttgcatcctgatcccttggccatacccctttcttgctataccaacaccgacccaaatttcgtcgtcgaatacgtgccagaagtatcttcttcggttatcctgttgtccaaaaatttggtacaaacctctaagatgtctttggtgggaccactggtcgtagatctcttagagacaacgggtggtcaacaaactgcagtgcaggttcagaaagaatcggggacttcacttcaacccttatctaggctgtgagagagactcatcaaggatggaaatacaaatcgatatattcacatcgcccaataattcccggttctcgagaccgactgcgatgtacgaacgacctatgtctaaacatacaaaccttcattatcttatttacaactactctgttcttcaagagtaaggcagctgcaatttatttatgaatcggttgaaacactagatgtcaaactatgaagtcaacgagtcaatattgtaggtcgtcgacgaggtctatcaacccgctcggggtcaaccaattcaggagctcctggaatcaacacagcccaaccaagacagggacgacaaagacccatcgcaaaagcctccgtgatacggagaactggacgtgggttagggcaaggtactcgtctctcacgggcattcgcttctctacagcgctcgatccacactgcttctgtgtgcccacagccactgataccgcagtggccacgataccatttatatcgtactttgcacatggggggtgatgaattcttcaaaaagtagagctctggggtaagtactcgcgatactagccttgggtggagagagttgatagaatatgggaggcttggaagaaaatatacatatttgtagaatctccaaaaagccctgggcccaatgaaatgaataacatcgcattaaaatttcttttatcttgcttttccttgtctaagacaaagctaataaggtgctatgatgattgaacaatgcattgcattggttgatatctttgttccaaatatgaaccataccctagtttccacttgattttcactccattctgagctaaaatctcatgttattgactattcaccctactcatgttccaatatcgttgcagaacaccaatatttccaccatcttcatcctgatctcgcagggccaagtcgatttccgatcgagtcggttatccgcaagttgcatgttgactttttgttgaccgcagaagccgtatgccactagtcatctttgtagaatatagcgactcatcctgatgtcagattttatcggtgacacaacagtggagatgtattggtccgatctgactgccactccgacagttcatttgacgctatggcttggcgctgctagaagaatcataaggtcactagatatcaaaatgtagttgtctaaatactgtctttgtaatttaatatctactgttatttcacctcaaatgaatcatcgcttgaaattataataattctcgtacatagtggtgttgggttgtggccagaaacagatatatattcctcatatatacaacaacaattaatctaacatgatagcttgcttcttgatcattaatattgatattgatttctatcgaacagacctatataagataccacaagtcacaagtatacatatttcagttaccaggtccgtcgagtacgatatctactgccggtcatatggctaggaatttgttggtcaaatcactgtagaacctccgcttgaaaccgaatctgttgtatgaattaggtaatcactattggcacagtagaaagatccttcattggccggtcgatcgttagacgttgtacagccttacgtggacatgactaaagccgtctacgggtcccaacctggcttggaagcggttaagcttctcaacttcgcaatctgacctgaagacaaatttgatttcatatcccctgaaatacccaccatggcaaatctcagacctccattcaccgaggagacagcgcagaaaaaagtcaaagcagcacaggatatgtggaatacgaagtaagtctcggaatttttcatctctatggccatgttcgaaagaagggtgaaggcttcatcccttgcattcttgccgacttgtattgtttgtccgtgcagatcgccctggacacatgcaacatgcctccgacggggaggatttctcttgtgctgttgagatgatggactattattatttgattgtgccaaaatagatgacgttagtgatgtcatctcccgttctgactatatgcgattagggaccctgcccgagtcgctcagggatacaccccaacgtgcatatggcgtgttcgagactcattctttaccgggacagaatctattgtggcgttcttgcaagcgaaatggaaacgcgagcgtagttacagacttcgaaaggaactcttcgctttccgggatgatcgcatcgccgtgcagttctggtatgagtttcaggatgtggaagatgagatgcgctggaaacggtgctatggattggaggattggacttttgatgagacagggaagatgcgcaaacgtatgatgagtggaaatgatgttctcatcggaccggaaggtaatggcgaggggcggtggtttgcagacgagcttgacgtgaacgatgtacatattagtgagcagcattggtgatatcacgatgcagatctgaatagacccgaggatgtgattgttctactattactgcggagctctataaaatctatataactaagaaggaggatatatatgtgcaactttatttggactcttaatttggccctaagaaccggatactagaacgtgcaaagcttagggatatggcatgctcaacacagatagacccctgtacagataagatggttaatagccctgggggttgaaatttgatttgttattatcccccttccttgcgggaatgccatatcgcccggacgatcgcaattgatgttgacaatgagagcacgatatgagtttgaattgtgagatacaaaattatttgagtcaggacctgagatatttcctttgaaaaaaagagcaacgaatccattgatcaaggcgctagtcccgagagcggagcagtgtgaagtgtgaatagtgacaggaatttttaatggttctgcctcgccacgacgctgatcgatcaaatctcatgataacaggcaaatatgcctacatggagtcaagcgaatacatcgtacccagtaaacaacaatagagggtgctaatgacattccgatgggaaggaaggaatctctcattccagtccagcccaagcatgcaagccaacctcttgcccttcatgaatattgacagttccaaactttttaccctccgtcttgtgtttttatctctgtcgcttaatatcctttctcttcttttttcccgctgcatctccgtcgatgatgtggtgttgaccagcccttgtcactctttagttttcttctcttccttctttcccagaatagtctggagccgatctttacacataacgtctttttgttgactcccagaaagagctgtatttttgcatttgatctatttttgttgtgcgttgggtattggtctccacagatgattgttgacgttgaacggtctgctaataggcgtctagaatcacgactaatctctaaacttcaagaagacgtggaaaacacatgcacgacttgcagagcctctacgatggatcagataatgtcagacgttaatgactctcagcggaggcgtcagcccttgagagacgcgtcgagtcggataaaccattccaagtcgccaaatgtcgtcgagacaccgcgcctgaggatcgaggaatccgagcagctaaagagtccagaccgggtgtccttccttatgaccccgaccccgcaaagaaacaaggaaaatgaacggctctccgtggccatcgactcgcagcctgactcagcccggaactccatcatgtctgcagcatccattttgtcgaccaaaggtaagaggaaaacacatgtgggaccatggcagctgggacgaacactggggaagggagccactgggcgggttagactggcaaagcatgctgttactggacacacagccgctatcaaaatcgtttcgaagaagtcagctgctatggttcagagtgagagtatcgcggcaatggaccgtaatatggggaacttccctaccaatgcggccacccgacaaatgccctgtggaattgaacgcgaagtggtcatcatgaagttgattgaacatccgaatgtgatcagcctctatgatgtttgggaaaatcgaggagaattgtttgtgcacccaacctttgaaattgagaatacactaacgcaatagataggtaccttgtccttgaacacgtcgagggtggagagttgttcgattatgtatccaacaatggaccattgccggaagaagaggccgtacgactattccgacagataattgcggcccttgggtattgtcatcgtttcaatatctgccaccgggatttgaaacccgaaaacattttactcgatgcaaaccataatgtcaagctcgctgattttggcatggcggcactgcaacctgctggccactggctgaatacttcatgtggtagccctcattatgcagcaccagaaatcatttatggccgcaaataccgtggcgacagagctgacatgtggagctgcggtatcatcttgtatgctcttctgactggttacttgcctttcgatggaggggatctgggaagcaccctgcggcttgtgaagaaaggagactacgagatcccttccgagttgagtgatgaagcagccgatctcatccagcgtattcttcaaaagcgcccagaagatcggatatccatgcaaaacatttggttgcatccgttactaactaaatatgaaaagcttcacaatgcgatgattgatcactacgtcggtcctcctcctgccctgtcggtgaaggactgcggtcaaaccctgtcctgtcagcaggacatcgatctcgatatccttcgcaatttgcagactttgtggcatgatgtcaaggcagacgagctaattcaaagacttctttgcatcgagtaagtaatatctggtagatatgagaaataacttgcgtgacgctaataaatccccacagaccaacgcatgagcgaatgttctacaatgctttggcaagatttcgtgatgagcagctggagaactatcaaggacagcctctagagtgctcagctagtgactatcaccacatatctcgcactggcggtagaattcgtcgaggccgcagccaaacgggtcagggtagctccaagcatcgctctcacttcccatctgttaaagagttccctcgtcgcctcagctccttcaaggagccaatgtcccccgggacggtggcgagctatgacccataccggtcacccaagcatagtgacacagcatccgaagcacagtatgcccatgttaccgtccgccgagagccctcagatcaatgccaagctattctatcgtcgccaagggtgaatcctcctgcttccattgcagaggagcaagagccagaagaatcagatcggccggatggctcgccgttcacggttctccagaagcgaaagcagggacctagctctatgaagtcattcgtctcttccagggtacctcattctagctcccgcgcgccgggattgtcgacgcactcgatgagctatcgtcgcaatgtttctttccaccacgctcgcaaccgctctcatggatctgcatctgctaaactcaagaaaagaaagattgtctcaccgaatcagccaaatgagatcaagcggtcaccgagtacctgcagcttacaacttatggcagatggcctcgatatcccggatatgccaagcagcccatccctgccagcacagccaaccatggtgcgagggaatggcccaaaggtcaagagcttgggacaagtcagaaaggttcgtgatacagactacacatggagggaggacacccggaaggtctcccatgagctcagccagatctgcgaggaggcattcaatggaagctctgccacaaccattcgcactacgagcggtggatccggttacgaaacaccgggaactccagtctcaatggcaagccctgagcaagttcagcctaattcgacgaccctggcgcctaacacttccaaggagtcatccggaccctacaatattaaagagcttatcgagacacgccaaaagctctttgagcacggccgggaccgaaaagacaacgttcctgcttatctttctggtgtcataactcatctagatcgcttgatcgaagaagaccaggtccagaatggtgcacggaaaccgttggatgtagcatccttcaaagatcctttcgtcacttcaccaaacgagggcttcccccctgttaccaacgataatcgcgcaagccctttccgcgcactaagccagattagccctcgacggcagcaaaagccacggacttcgctcgctacatctcagggcggcgatgtgaaggccaccatccggatggtaccacacagctcactgccctccatggaagaagttaagcctttgactattcggaagaagaactccagcaagttcgcttcttccgatgttcatgaatttgctatggttgattctgcgggtggcgatcggaacctttccattggatcgcgacatgctggtcaacctagtgggctggctcccattgaagaagttccgctatcccctaaaaaaaccacaccccatgcccaggaaggaaagaaatggtcatggtttaagcctcgccctcagggctcttacaatcctcctgctctcccacccaaggacagccatctcatcattcctagtgggggcacaactgtgcacaatgcaattaccctcgagcctgcgtttccccccaagacacaaagcccacagcaacttccccgacgaaaggcatctatggatcgctttggcggtggctttttgaagaaacttctgactaagaagtcccctcagaatatggaagaacctcctgctagtgagtgcaacatcggcttcttttgcatcatatactaaccaatctatagacaatgaaaaagaccctcaaaccacgccaaccaaggacaatcgttattcttccctgatgtgcaagggtctcgcagacaccgacagttccgttgaagcggatgatccgccaaacccattccccaacaagcgccgctcagttgccaaccacaactggtttgcccgggttttccagatcaagcctgctacccacgtcattgcactcaacacgtccaaggttaagggacgcaaggaactctacaaactccttcgcgagtggcgggattttggcatggaggatgtgtacctggacaagactaacggcatcgttcacggtcgtgtcagcgaagcaaattgtaagtcactcatttcatccgatccaatacttgtgctaattatcccctagtcctccaacttcgggaggttgagttcactgctgaattctacactgtccttgagcacggccaccaagccaacctcagcctggttcgctttaaacaggagcgtggagccgcatcgtcttttaacaaggtcgttgagacagtgcagagcacactgatgcgccgtggcatggttgttgaagacccatttcgtgcaaagaagatgtccagcgttctggattccgtccctaaccacaaataaactatttcacgactcattttctggataacccctcgatcccactatgaaggatcgccttcaaatactgatagccaaccatcgtctttcggttctcaccactacgtccgcaaaccatcccactggcatgctgcgttccagccctgcaaaagcactttccttgcatctcctattgtccgcccgttcagatccacactcgtttttgtctcggacaagacccagaaacctcacaggcctacctagtattgccggccacatccatagtttcatttcattttgtacccatcgatcatttccatgtcttccctttctctacttgttaattatccatttatttccgcttgtgtgtcacttctgggttctacccatttgtcaattccaccaatcttctaatcgatcgggtttcacctcttcattccgcgtttttgcatacaatgcctaatttcagcgagtcgcccatgtcctaaggcatcaaagccaaggaaaaattccgtatatctaattagtgtcattgaagtggctggaatagtcaatgtccacacattatacattctatcctcagcgtgaacattgcccatggataggtcctttatccagattagggcaagtcacgtggtaatcactcgcatatgtacccaaatgtatgtctgcccgtgcccggtctacatcgtacatacatacgcggtctatgcaggtcgcagtatgctgaatggggtaggtgcatgatgtagcatgatgtagcatgaaaagaatgcaatactcgatctccaatatgcagccaagattcccccttcacagggacaaaccatgcagccaatagtcgcgctatctagggctgagaacccatccagctctaacactccacctagatcagaaaagaccaccctagatcagaaaagaggctaacgggaagtaagggaaacggcaccccacaacaaagagaaaactaggaaatgctctcgtccagatgggatcaattggatctgcaaagccagagaataatactcggtataattcgcatcatagaatttcatcagaaagcgctcagagatacaaggatcccaacggaaagtggaatagcacgcggcaataactgaatagcagaaagagtgatcaaacaacctccggatataagtataagcagatatttgataacgaaaagacagggaacagtaaaagaaatgagaggacaaacaaatataaaaaaagatcaaaacagttccaacgataataatcaaggcaaagggaaaatatgacacagccaacccaagtattttagtcgcataggcgagaaaacagatggccacacatacatcgtaaaagatgtaaaagagtagtaaatagacaaatgccttcccagtaatgtaaaatggaaagaagaaagtagaaagaagaaaagacaaagctgacaacagtgaaaaacgcgatgagtgaaaacgagacaaagtgcaaaaaaaagatagccacccgaaattcaaataacaatgcggataatatctgcagcctcgtagttgtgaaatgaattccacggaaaagacagccggagagtgtgtgattgacggtgatagtgcagaatgcgttcatgctacattttcaatcgaaactagcaaatgaactgcatgcacctgaaaatcatcccaaaccacactctcagcaaagccaatcaatccttggaattgcgattattcagatatcgaggccgagaaaaatcgaaaaggaaaaacaaagatatgggagtaaaaattcgtatgctgataagaccagagcccataggcctggaagtttcagtatcaagttcaaaatggtgctcgtgaagctcgtgggttcgcgtttcgtgaccttgtgatagatcagagagtgacgttcttgtctcgttcatcgtccaggtactcgtcattgtctggaatgtcattccgaaactccccttgcagcccaatccacaacggtccgatgagacctcaaatcttcttttcaaattgtagctctcaacacatggcacttggaccgtgtggccagcacacggcccattccgaatgttcctcattcctcaccggtcccgtaaggcattctttcgtgcatttcctagtttccaccaggatattgaatagcaacgtaggtattactattgcggaccgcggcgattcagcgcattgagcatatcactatcagtgctggagcgaccctgggaatcgccggggttcagcatatcgcgcacattcaggccacctcgttgcgagccacccggggtagaagttggcggcggtgtcactccccctggctgaggggtaccacttgacttgattggcacgctaccctgttgagccgagactgggggtatgctaccctggtgtggagtcataggcgcctggtggggctgcataggtgggaagggtgagccgtgaggtgaggaggaggggcgtgggtcgtagttataagccgacggcggtgaggtgcgccgatcgtggataggcggagggggataggcgtaagggctcggggtagtgtgagtttggtatcctggagcagatccagcgggcgtcacgggagccagattggttggatcggggtactcaaatccagaatttgagcctcggcggtgtctctgcgcatcaaaacatcagctcgagtctctctttctctccctcttaccagagggggaatggcggccttaccggatcgggcatggttgacgcaaggggcagcgggacaccatccatgaaaggtcgtccattttgatagtacatcccttggggcggtggcaaggtggtctctggagcctgcggctgctgttgagggggcagaggctgtccgtgggcaccgtacaggacaggcggcccaccgcggccccctgatccattctgtccaggtcgtaaatgagggtaggcggtgtgtgcgggcacaaaggcttgggtttgcgaagagactggggtgaacatgcagtcttggttgaatcgaacacagttactgcaccgtccatctgcggaggtctcgaaacccgagcaacgaatctatccggtcaaaattagcgcgtgatgactcgcaaatggggaggaatcccctctgtaccttccggcgccgacaataccggcatgcaatagccgttcgctgtcgcggagctgctgcttgataaggcccttgtcctgtttggggtccatatgcatcggcgcgataaggacccggcggaggtgggagacggtagggatcttgcgctccgtggatagcgttcatggcttgtgggtgcggatatcttggatccgggtactgcgccggggaatactgcgatggggcgtactgcggaggaggaggatactgcgatggcgcgtattgtgcgggagggggatattggtaggcacggtcctggtcaggtggcggagggtaggaagtcggcggatactatgaagctatcagcaaccgcagccaccacaaagtcacagcactgtaaacaggctctaagacagcacatactgggtaggaaacctgatcatccggactgttccactgggtggctctggggtctcgatgatctcttgggtctctaggatcctggcgatttggatcaccctgacggctagggtcgtgatcgttgggattgcccgacatttgtgttattggggaagagtaagacgagataagtaaaggatgcagggatgatgtcgagttggtgaaaaggggagatcgaatcacacggacaaagtgagcatagcgcagtcacgcaggggaaaggcaagaagggcagatgcaggaagatcccaaaaaaaaaaaaggaaacagaaaaaggaaatataggaaataggaaagcagaaggggaaaaaagaaaaagaaaagaaaaagaaaaagagagcctcggtgattatgacgtgagcagatataaggaattgaaaaccccacgacaagataagcagagaagagaagaagaaaaagaagctcagatcggaatgggcagagaataaagggaatgaattatttgattggaaaagcacaggggaatttttagagaacggggtggagcccgggcagcgcgggctaaagcggcgccagtgacccatagacatggaggggggattactgtacagtgacagtgtatctatacgcggaccattgtatgtaacagtttgtgtgtccatgtcgaatacatgcatggatacggagtacatcgagtaggatgaccttaccttacgctttcatttcatccagtgaaacatgggagacaagattttgaaccatggaatttaatctagggtaccagatttccgttgccatgaagccgagaacggcgaccgctcttactttctggtttcttttttcattcttttcttttatttttatttttttcaactagtagtagcgcccgagagtaactttccacgtttttcgccactctacattattacctggaacaatggttatacctccataataataatggaaacagttctacatgtttagaaagattatttcaacttccaaagttgacatcatcatcaatgtggcaggtgacctcttttgcatgggtcaatccatgcacgtcaattcctccgagtgacccttgctgcgtaacccgcccatggacgaacgaccgcctcggaccgtagtcgcacaaccgcaaccggccccgcggaaccaggatcattttccatggcgatgggctcgggtcggggcgacacattcccatgcataatcggggttggtttaattgtattttatttttattccaaccattaaatggcagtattatataccctattttttgtcttgaccaggactccctagtccatcaagtacatggaactactgcatgtaggtactactttgaaagaaaaattcaagcggtgaaagtgtggcgatcagacttcagctgagggagtggggttaagctagaccactcgccactcttcaacaacgaacggcatccataggaagacaaaggttggatatggagtatggcacaaagtctgtgtgaggaaaaaaaagtgtgacgagagcggatctgaaatgaaccagactttggagggaaagaaagagagaacgaaggggggtggagtgccctaagttcccagggctgtagcactggatccggaaagcccataatgagccaaggtaacctgcattagcgctgcgctgacagggcgggttccttgtccaagagccacaaccacgttgtacggggggggctatttagcgtacgcccccccgtcaccgccaatctctgatcaaagtcttcagcccatgtcatttgcaatatacagggaatgtgggttctgagataaagtgtgaataatagcagatggtcatagcgatggggggttaaaaaaaaaaagagcccacccgcacaaccatggattgaataatatatcgagcagattgtaataatacgagtgctctgtactattgcgcaggattaatcaatcaagtttcggggtacttgtcccacgggccgctccggccttcccgccgatctatgcatgtgtgccatctggcaaaaatacatcctcggctgttacagtacagtatttatctacgtctcgggggcacatatatcttctacataccgtgctatcatagacatgacctacttgtcttggttacttaaatatttatgatatgattacatggatacctcatgaaaataggtacatgtataaagtgctcggttttcataaatataatacactatcggtaatacacagtaatacgacgtaaaatggagtacctcccgatataagacaatcctttcaggccacgtttttcgaacccaatcgactgcattgccgtccgcgtctttccgttccccactctcaggcgtggcatgttcagctttgtccttctagtattagcgtgctctccgaagactttctaagatccacccggtccaaagctgctggccactcgatgctgtttgtcctagagacgcgctagctgtcctccaaactagcccatccgacagggactgagcgctgtttgtcgaaactgaacgcccaacgctaggggacccattccgacccggggcctttttacaggctgcgacgttccatcgtaaagtttttcttataacatttttacattatataatatttttgtactttttttggtttcaactttgcatttagtgtgatctttttctattttctatttatttattttttttcccccgaaatttctaagttttcgtcccaactccaaggtataaaaccccctccttacccacacgggagcgcgtctatcagcaaggatggagacgggtcgggcactaatagacgcagcccgcatgtctatacggtcacgggaacaccataagcaccaatatagtaatgagtaaaaaaattcacagggagggcaaggtctgtgctggggatctgacgtggcgaggggttttttttttctgcactgagccggaacaaggcagtgctttcaaagtcggtgtacagcaaactcgaacgtgcaggtcgtgtgatgggagatgcctgatgactacctgatcctgggaaaagcatatgcgagatcggcaagaagtcatcattagccgagtctttgatctttctttgctcttctgttcttcctcccttcgggtcaagcaagtttcctatttctgttattcgtgtcatattcgcatctgattggttcccaccatctatactccgtacctcatcggtcaacaggtgagccatgctccttaactctattcgggcgctattcgggagacaaagcgagtcaattccactttgctttttctggatgtggttctcgggagcgtgcgtgaagctagggacctatggcatatttaattgatgcgcaggttaactgcttcggatttgctttttcgagtccggagtccattttgcttctttaggcttgcttttgactttgcaaatctgaaaccacctaggtgtttccggctagattggattttgtattgcatacagatgcatttagggtatcaccaatctaactcaacagtaggtgtctcataaaatcgaccgactctctcaaggttttaaaggtcgatccggcgtctaccttgatccctgggtttgagttaattggctgttctaggtcaataaacatcatgcctgtcgataacaaacaagacaaattgtgacatgtgattactcctaccctagacgtttaaccccaagtgtataaatcttgtcagcccttgagcaacagaatatagttcgggaattcagattccacgaagagtatttagggaatgaatagagtataattaacatgtttaatccccgacatagagtatagacccatcatggtcttgaaccgcgaacttctagccctaaatattccttgggaagtcgaaataccttcgatatctcgcaagactttagcatattccattctctgtatatctagtgacttacttaaggccgccattcacaagctttgagtcccaagtgtttatgaaataatgtctacttattctgtgaccgaggttgtgtatgtccttatatcgatctctcaaagatcactccgtactgaaagtgggaatgccaatcttaggtctgatgcgtgaaggaccatgacaatatactggaccccgggataagaaatgctcatcgtggacagccgagtattgagttgatacatgaccatcacgacatactagactgagaccagcggaccctgcctgaaatgaacagcatcgtccgagaatcagaaatccgcagtgcataccaaacacatacagtatgcattactccgtacaatgaaacaaaacaataccacccagtcaaaaaaaaaaaaaattggagtccattccagacaaggaaggtgctcatctcaaagcccaaaatcggggacggcggagtagaactatccgggccccaatccacattgcctgcaggcccaagtttagtctagcgggcatgcccgacaacgggccgaacgcgggcgcttgcggtggcgatatcatgcgcgtcaactgagtgcttcatttaattcggagagttgtgtcttctttggtttgcataactatgttgtacattcgaaattcggttggggaggagtgtagattgcaaaaaggttaaattgtatattgcacgcgaggggctgcgaggggctgcgcagccattgggtgctggcacggctagcaggattgcgtcgaagtgtctagaactgcgtgtgtcacagtagtaatgtctcaatttggagcgttgcccgtgtactatatagtctgcagtgtgcagcagtgcggcagtgcagcaactagaggtgatatgaccgcagagccaatgttagttgcgttatttgggcccgcgccagtgttcggcctgcagtagcaatccaggaaacgcggcggggactgacgaaagaagccacgtgcaggaggcgtcaaggtgggggatgggatcccggtttcacgtcgaggacttgcgagagacaaaagacccgagctaaggcagacgttgaacgagaaaaataaaatggagaaatctgacttgtaacaaatacgaacagctctttataccccaactttcataccacacacgcatgccccgaagtaagaggcaaagcgtaaaacagaacagattgacctctctcccccctcccgaggtcccgtccaatgccaaataggcgcgggtggttctctccaatcatgtcactgatcaggcatcactacactgttgagatacgtcacctgtttgagagacgaggagcggtcagcggtcagcaatacagattctccaacataaaggttattgtcccaacagccttccgatcctgtcaaagcgggaaggggagaaaaggaaaaaagggagaaaaaaataaaagaaaaaatagggaaaaaaaagaaaaaaaaggaaacccatcgtgacaccagcgctggttcgggtgggtaaaagggacggctaacaccgccaaagcggctagcttagaagtgaaaacagactagtcaagagggggcaaaaccggcgggaaagggaaatcgggaatcgatagattggaacagggcttacgaaaggctccatgaccccaaccagagtagcaatcatctcttgggcattgtctccagtgagttcatcgtcggcaataggcttgccaatagtgaaactgcgtagtcgaagtaatttgatgttcttgttgtctgcctcgtaaccctagaaggtgtgtcagcaagggcccttccaaggttccaaagatgaatcagacgtggagcctggcgcgagagtgaaccatggaaccaaagtcgacggcgtgagaacgaatcccattccagcaagtgcgattccccattgagcgcaaactgccaaccttggaaattgcgttgctgggttccatggttgcgttccgggagtgaaaattggcctaaaacacgggttggcctttcccgtaacccccgtgcgcgtgtcttccacatctcccgaggtctcgcgtttgatggttcggagcacatgaagcactcgggacatctgaaactcttaaattctctcgaatcctcgggttccttccatctctggggtagccggggtcacgtccagcagcccgaccacggcatcgcttggtcaaccgcaaagaactggtctctatgatctcatcagaccgttgctatcaaggccaggaagatggtactggtcgatgcagacgggaatgaattccgtttcaaggaccaatcccggtcggacgatggacgcaacctcgatagcgaaccttgtgccccctgcctccaagacctccgcgtcccagccataaataataatcaaaccgctgacaatgaaaccgaagcacaagatgatgggaaggagtaaagtctgcctcaagggacaccatacttcacattgggctgagggtggaataaacaacagaacacttctcaccttgggcttcgtcttcagagcagactccctattgtgatgcgtaaaagcatccacaaccgcgtcgtcatcgtcggacgctcccttcaaaaactcacgacgcatctccggcgcgcggagtacctccttcaagccatccgagttctcgtcgatgtcctctcgcagcagtgcaagtggctcggtctcggggttccacagcccgcagcctatacacagcgtgggattagtctcaatggacaaagatcacaaaggaaggcagaatagcgatggcgacagtggaaaccagccggaggacaacctaccaacaaaacaagagtttggctggaagtggacatagtatgctgcgtatgggcctttcttgccagtccgagacctgcactatattcagtgacttggctttccaagaaattcattgaacattgacacttaccaggcagcggagaaatgcgtctatacattttgaatcagcacaagcactgctaacgagcccgcagtaccacgcaccccgccacatacgcacgcatgcgacaggcacagcgagagggacttggaggggaagatagcttaccttgtatggaagtggattcttgctgaagcgaacatccctgtggatgcggaatacctagggcaaaagtttatgagtgccgggcacaggtaaagacaggagtattcgcaagcctaccaggtccttcacaggaagttcagggatggtagcatccacctctgcaatcttcggcgtgagggactcaataaatgtctcaaagtccttctttgccgctcggtaatccggatcatgcgctacacaggtcagctagcaactcgataaccggggtatatgcgcgcttctcaccctttagccattggcggtcattgttactagctagatcgatcaagaaaagcctagtattgggatgtaaggtctcatcctggtacggggtgttgcccgcatctcgagccttgggctttgcgatgatcacttcttgcccgggctccaggcccgctctgacgccctcacgccagagctccttgcccttcatagggtcgcttccgctgctggtactctgtcgttgcttccccctcgcactgggtttcttcttcgcgtcctcgtctgtgtcggagagttgttccggctccgcatcctcggcgggggattcctcctctgcttcctcgtacacagagccagaggactcctccgcagagacatcggactccaactccggctcgtcggagtcttcttgctcaaagtacttgctcttcctgctcgtggactttgcctggctgagggacaggtcgacgtttgacttgacccgtttgacccccggttcggcggcggacagtctggctgaagcgcgtcgctttgacgccgtaggcgcttcaggcgacgtcagatcaggccgagatgaccgtcgtggcatacttagataaattcaatgaaaacgttcaaactcggtagagtctttgtccaccctttcttctctatagagtaaggagttggaaccctggtttcgtgtttggaattcaagaaaagcaagaaaagaagcaaaatactgtagatgaaagaataaaagtgataagaataaaaccagaagggtcccacaggccttaaaaaccggctgtaataaacattctccgcttttagtcccttactgttttttatttttttcctccgtttttcccccctcaagacgtatcgttggtaccttcagagacatcaatgttagttgttgagaagtgatgtgtagaaattcagatttgttggaaatggcttattgtccatgattatatattccgatctcagctggaggaactgatcggggatgagactgcgatatcggtgatggttttgggctggctacatgtagttgtgcctaacatattgctgtctttatagggggtgcacaaggtcattgacttcactaagagctctcaatatgtcccaatctcggcccttgactcagtggcagatgtactcccacgcctagtcccctttattttagctgtgtcttcgtctgtcgctctgaccatatcgtagccggtgctcgtttggtctttattaaggatcgatggctcgcagtggtaataatgagaattcggttgatagtagctgaggtattccctcagcttggtcacaagtaccccttctaggaaccgacaagtgttggtagctgtgtcgactttgctgagtgatcggaggttcttgtctgattctggtaagtccatagatagttgcaacatcgagattaagagacaggaggttatttaggaccacaataacccagaaagaacattgaagacactaatgtgctcagcgagacagcgagtaggaaataagaactagtaaagtactgacctacttcagcaattgcccggaatcaaagaggcgatgttgcaacgctctgatcaacctaacctctgtcttcttaatgtttcaatgttgatctcagccttctattggctgtcagctgtcctactatatgcatgttaccgcatagcctacaaacaagcaaaaacaacgcccgcctagagaacaaccacacaagaaaaagcaaaggagagaattcaatgtaaatgagatctagctagtcaactaactgaaaagtgacatcaaggctagaaaaacatgaacctcaaatgagtttcctcgagggagacctcacaaaccggccaagcacatcccgaaggcagcagccgtgagtgggagatctcgcgggaggaaaaagcgagacaaaggaaaataaagaaaatggcgaacgcgccagggagacaagggttttctgaataaagctggtggacgtctccatacatcacacgcagaaaagaaccgagaaaaggaaaaaccagaaacacaagatcattaccattccgatgaaccaacactcctcaagcgagaagtactggttcaggatatccaccgcgtgtggcgattacttctttgcaaatcgagcaccgcggccagcagctcggaactcatcaaacacctggcgatcaatgttcgacagatgagtagcgtcggagcgagaccggtggctgctgggaccaagcgaaggaactggaccgaaaggatcagaggacgaccgaacgttctgcgcagtcgcatgcggagcacggtagataggccggatatcaccctggctctgagctgagccacccgcagttgcctcctgaagttgaggcatacgccagctaaccgactgtttgcgggatttggctgaatctggtcgttggtgtggcggaacgtaagcaggggccgatgcgcgaggccgatgagtcggggtgtccggcagatattgggcagaatcaagtcgctgagagctttcacgggagttaccagagatattccagttgttggttaactcaaggagactgctagacatatttctggtggacgaaacagtcgagcttccccgagaagcacggccggaattcacggagccactgtgggaaactgaaatggtgcgctggctgtcaactgaggcgagactatgggttggcgatgagccaggagcagtgccaatagttgagatgctcgagtttctcctgtgaagttgctggaatccagtgatgatgaacttccgcagaacactagcttcgtagatgattgcatccttgaagatcttgctacgggcaacatcatcatcccactcaaaccagaaccttccgaagattcgttcgacctcagggtgagtgtgttggttgagaagaccgtcgttctcagtgcgcagaaccgaaccgttggacatgacataggaataaaactatatcggttgaagattgaattagtaatttcccaaaagaagacaacatctcagccatgttacgtacctgaatagcagcagaatggtgtccaggaatgtaggtcagagtatcgaatgggaagtaaaggcaccaattatggtccaataacccaattcttctcttatccttcgaccaccaagcaaaacaatatttcatgcgaggattaaaggcagggcagctgatccctgcattaaccaactcattgagaaggcggatatccaagcccactgtgtttgccttttgcatacgttccactagagtcttgatcaaagtaacaagagttttgaaaagtgcattgcggtgatgcacggtgtaaagatgagttgcatgccatgggaactacatccgaagacaaagaatgtaagtatgacatagaagggcaaacggagaggtatggacaatgattgacttaccttccagatagtggtaatgaacgattcgtaacaacgctgagggaccttgctagcaaatgcactctgcaatttgttaaggtcagtaacatgaaaaaaacgaagaattcaaaaggaaaagtagacgtactcggtgaggttgctctgcgtgccgagtgaggcaaaacagctcctcgtcggtgagaaagccatcaaaaccggtggaccaactatctttgttgacaagctgaacaggattcccatcctcccatgaaatgcacttcgcccggggaaaagcagccttgagaagcttggctggggtgctgagttctatgtcgacatggcggctacccatccgtggggtactaccaacatcataggcacgattgatccggtcgacagtttcttcggcatccttctttgttgggaattcaacatagcagtccatggtctttccagtagaccgttccataataatatggatggggcatccttgagaggatggaagcaggttcgcactacgtccaaggaatgaggccacctcctggcgagtcacagtgtacggaatctaagtatcataattgttagtactggaatgttaaacaaagcagaagaacatggtggaaactcacgttagaaatcaccacaacaccattgcgagaaggtggacgcatctcaacgatgctcccaaatggaatggatgcttgctggaggagttcttcgattgagaagttttcaagacgctcaaaatccccaaaattgggggtcccaccctggtcgaatggccagcccatgttgatggcgttggatggaccaaagttgggtttgcagacgtttgctgtagtagagaccgttgtcagtgaggctcaaacagtttcactgatgatggtatagcaggtcgaccgatcacgatgaatggattttgaagatacttactgggttggaactgaccagagaggtcaataggattgtggtgagatacagtctcaaaaggatatcgacgagattgggactgaagactgagaggagaataggcttggggcacgaattcaaagggcctgggatggaatccaggctcaaactcaagacggcggtttggagggggacgaatagtggaagacgaagatgaacttcggttagaagaggatggggtcgaaggaagggaaggatgggataggaggggagaaacctgagcggtaaactgggcaggaacctccacaagagcctgagcagaaagttgagtgagagctggggtgcaatcagagggcgatttcttgagagaagaacaatcatcgacaattccaggtgagtgtttgcgactctcagagacaggcgtagtcacagtcggtgactctgggcgtgagttctcattgagagacattagatcaacattagctgctaggatacttatactggcaggccaatcctcaaatttgggcatatgcccatgttgttcactcatgttttagggctgtctgggatgatagtgcgtggaaacagtgcgtggaaacagaaatatttacgagagaaagtgcgtgttggtaagaatgaactatttatatgcgtggaattaggctacaccacgcgtttacgagttcttacctgtgccgagagatataagatgggattcgatctcacctttctcactgccatgtgtgctgtttgtataccgaggctttacggtacgtatttaaagcgacgcactcgtttctgcccctatccactaatttcacgtacctgatccgcaccaactgaaattctacgccttccttgtagatatcgcttctcttgaagataagtattctgctacttttgccaaaacaccgttggtcgctggtgtgatttcttcttgtttattcgttcaatactataagcgctatgtaggcaatttccgtcttgattgggaaggaacaggccatactagaatagtaggctagtgaggcactatgtcggtggaaatgtgttacaaaaaaacccgacatcggtataaagttctctcttaatcaatgcaagcctatgctatctgtacaggagtagaaagtggcaaacacagggccattcattattcggaatcaacaaggaaacgcttggcaatttaatcgaactgattgatcgtcagcaactgggtcaatggtagattattccatagagacttaccggtgtcaggaaagactccgcaacaaaacgagcacgggcattcaactagtgagctgttagtgacctgcaaagaacacgaaacatccgtacacatacgaagagcttcatctccgaaatctccttgtccacctcctccatgaattcgatcacgaaatcaatgagcttgtgggtaagcattttttccgtgtggaagttcgtgatgaggaaactgatgtcatatccctccactggcttccgacgcagaatgaagaacgattccgctcgctgggtgaggaaccgagtgaatttgtggacaagaatgtgctcgatctcatctgcctgcttgattctgatacttatgcgaacagaattgtagcttggctcaatcttcaccttttcattttcattcctgctgatgtgcaacctagaaagccatcaatacgtttgtccggtgcgaccttggatgaaatgacggtcagacgtacgggttcagtaggatctccggcgaagaatttgcctcaatctctgggcagttgctggtgaagcccagtatattagcatattccatgtttatcacttgaaataggggcaacttactgccgctcggatgtctgagaagcgaaattggagatcgtaagagctgcggtgagagaggaccgaacactggtaaatggagtgtgagaaagcctgccgctgaatatttgtcaagtgtcgaactcacgcctgtaggtagggccggagagattgactctaataatcaattagtatagaacgagccagctgatttgagctgtacccaccatgatgagggggtggccacaaggatgcagtcgtgacgggtgatgatggtcgggagctagttgagaaggaattcaattagcccgttgtgaggaccctttgacctaaggcagtgagcgagaaaggcagttctctggataacaggttgtcttaggcagaagaggagttgacgtcggggtgggcggtgatgatagtggttgggcggtgagagaccccccacgctccctcgtcccaggtgtttaccatttgccccagcaatcgcaagctctttcaagctcttcatccttctcacatcatccatatctaaaacttattgaaaatggcggctataccgagtatgtatggacgtattggcagtccctggaccactactaacggatctacagttattgtcaaacacgccggcaagcgccacgaagtcgagctcgatcctacgacgaacggcgaaacactcaagtaccaactcttttccttgactggtgtggaacccgaccgccaaaaggttttggtcaaaggtggccagcttaaagatgatacaccgctttcgtcacttaatgccaaacccggacaggtgttcatgatgatgggcaccccatcaggaggtcaaggttccgctgaccttggtcggccaaaggagaccgtcaaattcttggaagacatgaccgaggccgaggtggcacgacagaaaggtgccagacctgccggtttgcagaacctggggaacacatgctacctcaactcttccctacaaaccttgcggagtgtccctgagcttcaggatgagctcctacggtatcggccaagtggaggatctggacagtcgactctgtcagacctcagcagctttggtattggtggccttggaggttctcgggatttggccgcttctctccgagatctgttcaagcaaatgtccgagacccaggagggcatccctccactgatgttcctcaatgctctccgagctgttttccctcaattcgcccaacgtgaccgaaatggacagggatactcccaacaggatgccgaggaggctttctcccagatcttgaaccagttgcggactaagttgaccatcaccgaaggcgagggagagtctgctaccaccacctcatttgtagataaatatctcgcgggccaattcgaatctatcacagagtgtgaggatcccgctgccaaggaactcggcgagcaaccgagtcaaagttcagaagttttttacaaacttgattgtcatatcggaaaagaaacgaaccacctgcaggatggaattttggccggactcgaagaggaaatcgaaaagaactcccctcttttggagcgcaattctatgtacaaaaagcgttctcgcatcgcacgactacccaagtacctcacagtccattttgtccgattttactggaagcgtgaaacaaaaaagaaggctaagatcatgcgcaaagtgacatttcctgccgagttagatgttgtggagttctgtaccgagggcctccgaaagcagctcatccctattcgcgacaaggttcgcgagatccgcaaggaggagctggaagttgaacgttctcagaaacgtcaaagagttgccgaagagcgtgcagagcgtcaggcgaaagagaccaacttgggcgaaaatgtggagccaatgcagaagaaggccgaggagaccaaggctaaggctaacgacaaggacggcgatagccagatggaggaaactttcaaaactgatgccgagtacgaagcagaaaaagcagaagctatcctcgctgctaagaaagagctccaagagcttatcaaacaacaaggtgctggagatagcggaaccaatcagtctggtctgtatgagcttcgcgccgtgattacccaccagggtgctagcgccgacagcggtcactacacggcatacgtcaagaaacaggagcaggatgatcctcagacaggcagcaagcgccgcgaggcagacgacaagtggtggtggttcaacgacgacacagtgactgaggtggacgcgcagaagatcgagaccctctcgggtggtggtaagtgaaccgcattctacattttaaaagccattgctaatgacatattaggggagtcacactctgccctcatttgcctctaccgcgcgattgagctgcccaaatgcgagtaaatgggcttgccttagcatctgttcacatggtaaagaaatctgcaaatgttgcctctagatgatagaaacgatgaacatgaatgatgctagtccccaccgccttcgctgttaccaattgattgtcttatgccttgcaatgatctacattttgtatgttgtagtcctaatggatatcttctagttagtgacgacatatatattaatgactaagcaatgtacacgtgacatggttgagcctcggcccaaattgtctcaaagctctaattctacaggactggcaatgtaaccaccatgatacattatcgcagcatcctccagtcggcccttcgccggtctccaatacacacacgatttctttggagaccggtggtccgaagcgtcagcaccgcggcacaaccaaatgcctcccgagaaccatcgcgctggacgcgccgcctggtctataccggtatatttggaacgcttggcatcggagcagggaaatggttggacaacaaaatctcatcgccattggatcctgggtcgttagaagaccaaatggagattcgggaaatccagcgggtattcgacattggactcccgattgtacaagagctgcgtcgtaaccccgattacgtggaaaagaatgtttacgaaaacttcgctgataagcacaaaacccatcggctgacatcaggccccttggctggcagtaggggcttgggattacaggttagtctctcgttttctcattgggttccttgcatgaatgccgaaccttttgactaccaagcctcggaatcccgctttttctaactgtcccgtatctgacagaaagttttctggaatgacaaagagaagaaaatcattagcgtggtcttcttgggaccaggccttgaaggctggccaaccatggtccatggaggcgcgctcgccactgtgatcgatgagaacctggggcgtgtagccattcggcatttcccatcgcgaactggtgtcactgccaacctcgagctcaactaccgggcgccggtctactcggacaatttctataccctgcataccaccctagatcaggaacgaagcacagacaccaaggcatatgccaagtgtgaggtccgtgacatggcaggccaactatgtgttgaagcgacggggcttttcgttgtccctaagacactcaagctaaacatggttggggaatatttctgaaccgcgagaatattgatatctacgaatatgtggcggcctttttcgatcgtgtgacttcttcgaagcttcggccgagggttgttatcaactcaacgccggtatcccggtctcccggtctccttgaacgaagccaactggaagtaggaagctagcaaggggaaaacaggccatatacatgaattatttttgtataaatatgtgctatctgataacccctaacagatacaatcagcgtctcttgtacatatgacaaggttattaattcaatactcaaactctcccagcatttgggtttctggctatttcggggctgatccctattctggcgtaggtctccggagcagtgaaccaaccgtatcatctacatgccttctccacgttttcttccccgcatttccccagcatctttgccccagaaataccagaattatgagggaattgccaagctgcctcggtactttctggatttcaagcattcctatcccggctatctgctttaacgcgcattactccgtagcttgtcttcatttccccactctggacatttcctaacttgaaatacggaacagattcagtgtgctgaaatgaaattatattattgtggccttccttcgacactggatttaattatcaatatcgtatgcatttcagtcgaattcaattatatccaattttgttgacttggggccaaggtcaattccccgtgcttattttgtttaacattgtgctacccttgaccctcgcccatcatggcggactcaatcattcactcgagtcggccagccgacgagaaggctgtgatgcagcatgacgaatatagtgacacctcacagcatagtcaccgggtaatggctgggccgggctcagaggaagctatgcatgagtctgagaaggatatcccggtagggctcggctgcttaacctgtggttggcgacaatactgatcgtcaaaagatgacattccgtcggttcatgggtttcgctgccatggctttcctgtggaccggaagccagattccagtctacctctttggtatgtgagaaacaacatgaaagctgtgatataattttgatgcatttccactaggcggcatccctccctatatttatggagacattggtggagcagatcgatgggtctggtttgtgagtgcatacccattgaagtatagagctatgattgacgagcttctgttaggttcttgcaaacttgctcggcctcgccggtgtatgccccttcgttggatctctatcagatctaattggacgccgcccagtcgctattattggagcatccctcatagttattggaatgataatctgcagcacggtgcacacaatgaacaacttcatcggtttgtatctgcccatatgtcgcagtacatagacgttctctaacatggatacagcgggcatggccatcgctggtgccggtgctgggatcaatgaactgacagccctggctgcaacctccgagatggcgcccactcgaaagagaggagtctatgtgtcgatccttatcttcaccatcgtaccattctgcccgtccgtgctatgggctcagcttattgcatattacagccattggcgctatgtcggtgcgttctgtgctgcgtggagtgcctttggtctgctgatcacggttctattctacttccctccgccacgagtcaattcagctggtttgagccggaaggagataattggacggatcgactttgtcggtggattgctcagcatcactggtctcattgtcttcttggctgggttgcaatggggtggatatatggtatgcttggagataccctgtgcagggctacatatcttactgacatattaatttagtatccatggacatccgcccatgtcctggcaccattgatcgttgggttccttctgcttgttgcttttgctttctgggaaatctatggagccaaataccccatttttccatctcgcctcaagcaagagcctcggattctaggccttaccctcgtcattactttcatctccggtgccaacttcttctccgtccttatgttctggcccacggaatcattcaatgtctatggccatgaccccgtggaagtgggtgttcgcagtctccctattggatttggcatcatgacaggggcatgtactgtgcttgcgcttcttagtatacttcgtgggcataacaaggaactcttgatcgttagcagcgtgatgatgactgcaggtgagttttcttgatgggtataggagttcccaaaaagctaatctgttctcctcaaaacaggatgcggtgctatgtctatcggccgcactgataatatgtatcagctttggggaattctcgtccttgccggccttggaattggaggtattgtggtgccagcctcgattattaccacaatcatttgcccggacgtgagtcatcttgctagaagggaggaaatttgcctattgacattagctttcgctaggatctgattgccactatctctgcactcaccctctctattcgcgtggtaggcggtggcatcggctacaccatttactacaatgtcttcatctccaagtttgtccccgcggcaacacactacatcggtggtgtgatgatgaaagagctcaacatcaccgacgttaagctgattggcgaagcaattgagctgacaggtgcctcattgctaagcgagctacgcacaatccctggtattgctggcaatgagactgcttatcaaatggtcgtaggggctggtcagcttgcatatgccgaaggatataaatgggtatactatgtcagtattgcattcgggggtgtctccattgtggccgcctgtttcttgggcgacatccagaagtatatgacagaccacgttgccgtggtaatgtgagagcgtacccccaatcgcgatttaccaaaaaattgttcatttataggatatgtcttaattatgagaccaatacaacaaaattgtgattggaagatattcaagatagtagatatcaataagtagtaaaagggcaggccgccgatcatgacgcgccaagcccggcaacttttttactcgcaaacgtcaatacacgcaacttcaatcagcagccatggcatcccaaccttctgctaagcggaaacccttaaatccctcagttccgcatggtgcagccgggtcgtctcgtaaacgcgccaaaacctttgatgcgcgcaccttgactgtgcagtcggccgacgccgccctctccgcaacgggcgagctcgatgtcgcggcatactctgcggctcgggcattcgagatccaggctctggaggagggaatgcagcggtcgaaaaatgcgctcacgacgcgagccttccaaaaagttccccgctctctgcgacggcggacagcgagtcataatgtgaagcgagttccgcgaaggttgagggctcgggccaagcgagaggtattcattgacattgatctacaaagttccaataacagttgactaacccgctatttcaaccatgctagatggccgaggataacacacctactgtaacggcgcgcagacgcaagccatcccagatgatgcgcattcggctcgataccgcacggcggctgcaggctatcaactcgaaaacaaaggcccgacgggcggccgcaaaacaaaaacgggaccaggagaaccagacttccttggaaaaggagggaagtcatgccttcgatattgcgccacgagttcccaaaataaagaagaataagctatcgaggtctattccagcagagcctaagtaccgcaagcgccagcgatgcaagacatggctacctactcatttgtatcatgcaaagcgagctcatatggcgacaaccaaagacccgatttggcgttttgctattcccttatcccccaccgaaaaaagctatcggcctacgcaccgggctcgaggcgcccggggtgccgtggcgtgggatatgagctatatgtctactattcaggtggaaggaacagaaccagccgtccaggctgtcctaacggcagtgggtattgacggggacaatgcatggggcaccaaggggaagaaatggagagctgggactcggtctctacgggcctggacttttgaaaaagatgatcccaaacgtccgaccgcaccagtaacattgatatggtgtgccaagcagcaagatgttgagatgattgatgccgacgaacctcagcccaagtcatctaagaaagatcaccgaaaactctggattagagtccatccttcagccttcctccagctgtggacggatattcttggggtttccaaatcgcaaaaccccccggtcatggtcgaagacctgcgattcgagattggcagtattgaaatcacagggccagggtctaccgagaccttgttggcggcactgaaaccgattcttgggttagatggcaatgctccatcagcgcaaagtccggaggccgtttggccatctcttctaggggtatcgaacccgtcctcactgccgcctaattctctcctctcttttgctatttctgatcctcgcctgcatttcccgccacgaacacttcacgtcccggacaatgaatcccatttgaatgaccttgccatcttactttctacgtggcatccggacaaaacccaaggtccctctatgctgttcgaccgatccactcggttaagagcggctcgtcagcttccgagccagaaggctatcaaccgacgccgcactcttgccggtcctggtgaatatccgccatcccaaccatcagatcctcaaattccgatcatgatcctcgcaaacaagccacaagcccgggccaaacacagcagtgccccggggtcctggaccgtattattgccatggaaatgtgttgttccggtctggtattcaatcatgttctatccattatccagcggaggaaacccattgcttggcggtttgaagcagcagcagcagctcgccttcgaagcaggcgaggcttggttccccggagatttcccaggaacacgagctgggtgggcatgggaccaacgtgagactgcgaaatctcgacgtgactgggagcgacgtcctaaggggcggcgccccgaattcgataatatctcgttgggtgatggtcgtccaaagggcgagataggccacgggtgggcctgtgactgggaaaggcttcttcaagggccgaaacacgacgatgcttcaaaaattgccgatgtcagttcggacaaagggccaaccaagtccaaggaggccgagacccaggacccctctgctcccatcatcccacccctcaatattcacaatgttcgtctccctccggccgatagctaccaaatcctgagtaagctcgacacaacatccgtcgatgtctccacccttgccacggtctatctttctctcaccacgcgaggcacacccacaccccgtgcacgtatctaccgacttcctacggacccagatctacgccagaaatggcttgatcttggctcggcaacgatcaacaagtctagtcaatcgaagctctccaagggaggatctactgcacccgaatctgcagaggctcggcgtctccttgccatggctctcatctcacatgctgatggagagcctgactctgagccattggacgtacccaccgaagatgacctgattggatttgtgactacagggaactataatctgtccgaaggcaaagggacaggcattgggtctatccagctctcaaaggtactggctcccaatgccaagccttccgagaggagaatgtgtatcattcgggcctcgggggagaagagcgggcgtttagggatatgggaatttgtatgatatccaattcaataaaccagcagtgaatctgcccaactgtggtgttaaacactgtctgccccagtcacttgatccttggtatatctttctactggcagaaggatagccctcccaaaagttaaacgacaaagatccactctcatccatggattaactctatcctatccagatgaagacaaatggaacaaaagaaaaatgcacattctatacatacagtacagcagctccctgcccaaaatcaggtcccataaaacgtagaggcttcacatcaagccgctgtattcccgaactcaccgatctaacccacaatgcgatccacaaaagcagcctccatgcgtgcaacctcgcgcttgaaagcatcaacctccacccagcagttcaacggccggcggtcgttcaactgcagacagctggtaacatccgagcgggccttagcaacgccatcatcgagctccacaagcttcctccgtccatcaagcttgctccgcagctgctcgatctcagcagccacagagttgcgcgagacgtcacgcttgacgggccgggtagcgacagcggtctcctgcggcgcgatgactgtaggcgcggggtcgtggtggcggccggcgaaggggatccgcggtgcgtccaggttcagtgagccggctgggtagcccgaggtggaaggagcgaggggcgcggttgctgctgtgacgggcagggaggtggtgtctttggactctgagatgcgcttctcgatctcggctagggtttgctgctctcgttcgcggaggcgttgcagttcctgcgcgacgcggttttggatctccaattccaggactttggcgcgggtggagtcggtctgttcaattggtggattgtgagctttttggattgagctagggtattgctctaagccgcgttgtgctcacctctgagtttgattggagtgcgtcaactaggtttgaggagaattggacgggagagttgctgtgcatggttaggttagcattggccgtaggatgctttggatgagctccgcggtgtcgcatgtagtgatggcatcctgagagctcctttagatctactggaaccagctgcccttggcaattggtgccaattggaaggtagttcccgttctctccgccatcaagcatgaaatgccgcggaagctgaaatcgaagtcggagagcacatacctggagaacacatgttgtgagccagccgaagcctcgggcttagagtttccagcacccatttttgggggaatgtgacgagtcctgctaagatagaaagacggtgatggttcaagatgcccgctcacaacccgttcagttcggaggatgttggaggtcacgtgtttatgttagtcatcaccggccgggtcagttgctagtttcacgtgacggtacatacatctatggtcacatgatacatagtctggcatgtcaaggtcacctgaagtagttactgaagagggatatgcacgatgggcagtctagcctagcagacaagacgtttcattccgtgagtggtttctgggctagcttctctactctaggatttcacttgacatgaaggccccgagattatctctctgcctgaaagacaaggcccatactggaggattccggcttttcccactgcatacaaaatctactcacgtcctctaatcatgtggaatcaacatatcgttctccatggccgatatgagcgatattgttgatttcatctctccaaattccccggacctgtctagcaaagacagatggtctatatttgatccaggatttagagggtcatattaatcgggtttaagacgtagtattagacctagcatgattcaatattttaggttgttaagacctccaaaatgcatcatcgagagctcggccatattgactttagccatgaggaaatgatatgctattacccaactcttggttgtcaaatttcgtcaaatcaacattctttccgagacttctatatattttggtctaggcccacaccctcctaagtactacggcagaattgcaatcagactaacacaatacctcaaaggacgatagtctccgtgcggcaacagtcggtgttgtgggtagaaccatctttcttccatggttattttgctaacaccatactagagattcggatacttagccagactaatcaatatgaaaatgagcatcaagtactccgtaaaaaagtaatgtatgacatcggggtccggccatttgacgggccgatgtaacccgatcgtctctgtatctctatgaagcacaatatgcacatgcacatgcacatgctgtgctgtatataagcgtgatatggtcaactaaatatcaatgctaatgctttcaaatcacccaagtcagcatatacaggaacacacattagtggatgaatacggtgcaagatagcaggattatcccccgacgtggcatttgtatattcccgtcccctgccccggtcttagcctgtgtcgctcaccggggaagtcggggaaaatacgcagttcgaaagaattggccagtaacgacgcctccccgcactgtctaaatgtctcctgttcatagcgtcatggagcgaaaatctgggttgtgaatgccctaggaatgtagagactgctttcggctatagacaggatcccacgtagaatactccagaccaatatttgttgattgccctatagttcaaagtatgagattttgaagtacaattcaaaacaaagtaacatttccggtgaacccggcaattcccccgtaccttgacactacatcgtagatacttcatcaatagtggccattgttacggcggggagtgtactgccaaggtaccggactgacctcatggatacccccctccccggtcccctcatcccaccttatgttctgtatttcgtatcttgtttcttcactctcccccttttcttcttcccttcttcttcccaacctgtccttttccattcttttctcaattagccgataccttaactctctactctctgctcggctattctcatttcatttcttgttacactatgtcttctgcgctcttggaccaagccacgcgcattgcgcgcggctttgattaccccgccgagaatgtgcagcgcggggttgccgagtacatcaagcagtccaacgagggcttgaccaaagagggtgccactttgagccaaattcccacttttgtgactgcggtgccaaatggcacagagaaggtatgaaggcaaactatttacaatgggacttgcgcgctgattctccttgccatagggcctttatttggctgttgatcttggcggcaccaacttccgtgtgtgctcagtcctcctgcacggtgatactaccttctccctcacgcaatccaagatcctaattcctcgggaattgatggcctctggcacatcgaaggatctcttcctgttcttggcccgtcaaatcgaagcattccttcgcattcaccacaatgagcacttcgaggcccaccagctccgccgacaggagggtaacaacgaagaggacatgttcgatctgggctttaccttcagtttccccgtgcgccagtgtggtatcaaccgtggaacactgatccgttggaccaagggcttcaacatccccgatgcggttggccacgatgtctgtgcgctgcttcaggctgccattgatgatttgaatctgccagtgcgcgtggctgcactagtgaacgataccgtcggtactctcatggcccgctcatacacctcgccaggcaagactggcactttcatcgctgccattttcggaaccggtaccaacggtgcttacttggagaagaccaagaacattaccaagctccagcatatgaaggatgtccactttgacgactgcacaggcgagatgattatcaatgccgagtggggaagcttcgataaccacatgagcgttctccctaccacggtgttcgatgatgagctcgatgctgacagcaacaaccccggtgtgcagatgtttgagaagcgtgtttcgggcatgttcttaggcgaaattctgcgccgtgcgctcctatctctacaccaaaacaccgacctggaattcttcaaggccaacaagaactccaaggtcgtccttcctgaaggatctagactcttccgtcaatggggtcttgatacgagcatgcttagcccaatcgaggctgataacagcaaggacttggtggatgtgaagaccgcattgaaggatcacctcgagattgagaaccccagcctggaagagtgccaggctgtgaagatcatagttcacgccattggaaaacgtgccgctcgcctgagcgctgtcccattggctgccattctcgtgcacaccaacaagcttgagactgatgatatcatcgacattggtgtcgatggcagtctcgttgaattctatcccaattttgaagggcatattcgtgaggctttgcgcgaggttccccaggttggagtcgcaggcgacaagaagatccgcattggcgtttctaaggatggcagcggtgttggtgcagctctgattgcgctcgtcgctaacagggtcgatggccatcttaaaattccccgcgagaaataaatgacctgaactatcctatggttccctttattgttgtcttttgtttgtcggagctctccgattttcatgacctttaaagtgtccatctctctctccccagcgaagttgaaaactacgtaggttggtcgaccaccctaatgtcctcagaatctcagacctgccacaatccgttagtcccgaaacaaataccaacctgaattctttcatctttcgctcatctaaacctatggcaacactatcggctgaaatcaagattcagatcttgatagtcaattgccaacccgcaggactttcctacctgcgggtgagggcatccgcaattatcatatcacgccccattccatcaacttcccataacgaggttacatcacattggggctgaattctcaatttggagttgcggaggcttcctccgaggccttgccggcgtggaacggcatgcgatgcaagaaattgcatcgaactggcttcacacccattgtcatgtccatttcttgtctatttcttacttcacaatctcattgctttttaatgaatctctacaagtagatgaaccccaaggcggataatatcacaacatttagaccagttctattggcgttatatacttctgaagcacatcaaagtcccctatttagcatgctcatacccaatagcccgaggtgcctgtacaaaatcgatatgaccagctgggcccgtcaagaaggccgacttcccaccatcagtactcggatcatatccaatgagattaccggggaacccaatatcaaaagtagttgccgcctccaaaaactcaatctgcttatccgtaagccgaatcgacaacgcccggatattgtcatgcagatgctcaatcttgcggcctccaacaagcgggaacacattcggcgccttgcagagcacataggccaacgcaatagcagtaaccgactcaatcccatgctcagcagcaacaacggccaatgcctcggagatatgcttctcctcttccgtctgctcaccacccaccgtactacgcagaccctcgcctgccttctttcgctcctcgagctgtttagcagtctggaaatgcccactgccaagcacatcccacggcgcaagcgccatcccgaaatgccgcgccatggggatgatatcgcgctcaaagtcgcggcgcatcacgttccatcggccctggtagatggagaaaggtgttttgccgtgcgcgcgcgcatacgtgttcgccgcggaaacgacccacgccggcgaatccgaaatcccgaggtacatgaccttgccttgctcgacgaggatatggagggagtccatgatttcctcgatggaggtagtgtggtcccaccagtggaggtagaggacatcgatgaagtcagtttggagtttgcggagggagtcgcgaacgctgacgatcatgttgcgcttgtggttgccgcaggcgttgggggcgttgcccttcccgagcgcgtggctgcggtagtcagttgtgaacttggtggctagcacaatctggtcgcggttgttgcgtgcggccatccattcgccgagccaggcctcggattgttcgttctggtagttgtttgctgtgtcgatgaagttgccgccggcggcgacgaaggcgtcgagcagttcaaaggatttctctttgctcatgctacccatgaattggctccaggcgtcgccgatggacattgcaccgagctggagcggggagacgcggactcctgctgttgaggagaggacccggtaccggcccagaagggtggcgggctcaggggcagctttgaagagttcgtccattgtatagtaggtgtggtgttttgtttgttgttatgtaaatcgatggtggtgggctggactatcattcaggtcggttggagtgccttttatacttggtctttaccaatcaagcccggagataataactcggtagtatcggctatgtttgtcagcctatttcatccattgaccttgatgaccggaaataaagctccctcgtgatatatctccgttcccacaatttattgctcgtcttcctgctgcctcatacatagaccctagataagtaggcacataattatagccaatgatcaagctctacgtgctagtacagtattttgtaacgccaatcggttatttatagtgtatgaatccgtagcgccgcccctccctgtgggagacaggaaatggatattccttaaatccttaggggtgtcgagctcttgaatcaaggcgaagactactcagacgaaaaccttagaatagctatatagtgccagtatagatcagctgagcccatgccgatgctggctctaatcatctaagctgttagaatggcgagtatagccagatgagaataatcatgatactgtgccaatagtgttctacatcatagaagtatgatgaccaggaaggacaagcttaaatccgatctccgagttggttctttggttctaagccgcactaatcctaatcccgttagagccgtgtcagctgtctatcgttgcatattaacgtaatctccgcaactatccacgtcgatagaacacttgtttctggagtaaacccttgatctctcttctctgggctgttcggaccctatgtttatcctttgccccctgattcatcaacagcggtgtactcagtaatccgttacaggatgtttctctggatggagcaaggggtgatgttatgcacatccccctgttcgttgattggcgagcaatcaacatttacacgacagccgaataattgatcaccctgatccttgcattcccctgactgcaactccacctaggcaaaccgaactcgacatcttgtccgcgttcaagcgcacgttttgactcaaacccggtgtcttttctgacggcgcatgatgttcaagtctactgcgactaattatagttgtatcaccgcattttcggttgttgctattgacgaaccaatagactaatcccttgagaactagatctcgctgcctaactgcaaaaattaaatcggcagggtatgcagctcggcggaggattccatgtaccacatggactctcgaaatacgatcgcagggttctgtgtagcctggattggtccttttctccttcccaagaaatttacaggcaaggttcttcatgagacctgtacgaactggttgtgtttccaatgtcactcttggcttattttccctgtttccttttaaatcgctatgttttcctgctcttcattcgtcccaactttcgttaaatctcattacgggcttttcccctacttatttaatacttgtcttttttttcgttcattatgggcttcctcaatgccttcaaagctaaatttcgcaaggagggagatgtacctggagacaaaaccgagcacaacaatgagcacaaaaatgtggcacccaatgacgacacccattcccagtctgaaggtcagacttcaaagcctccaagtgaaaaggagagcactctagtcgatgagcctttgatgagaaatactactcccaatgatgacaccaagagtgaacttgcgagccgtaataatccaacgcctgttcacaacgactccaaccgggagctggtccccaaaaagccattcgatgagcagcccacagaagaagaaaaaaaagaggacagtgacgccgaaacgccggaggatgaggaagaatatccaaacgcatggagattgactatgatcagcattgccttgtgtctatgcgtgttctgcgtggcattggtacgcactgccaggctgctttacttgatgattatatccagctaacaccgatcctccaggacaacacaatcatagcaacagcaattcccaagatcactgatcaattcaactcactcgaggacgtcggctggtacggaagctcatatcttttgacaacatgtgctgtgtccctgatgttcggcaaactctacacgttctactctatcaagtggatatatctcagtgcgctctgcattttcgagatcggctcgctcgtttgcgctgtcactcccacctcggtcggactcatctgtggtcgagccatcgccggcctcggagcggctggtcttttctcgggctctatcctcattatcagcaagagtgtacccctagtcaagcgaccgatgtatacaggtcttattggcgcgatgtttggtattgccaatgtagctggtcctctgtatgttgctcctgttccttgattgccgaattatgctaacttctgacaggatgggaggcgcattcaccgaccacgtcacctggcgttggtgtttctatattaacttgcctatcggagcagtgactttcctcttcgtgctatgcttcttccaagcacctaaagccatcttgaagaagaacaccttgagagaacagatcaaggagctagacctggttggctctctctttttcctgccctctatcatcagcttgttgctggcgctgcaatggggtggtaccaagtatgcatggggcagtggacgcattatcggcttatttgtggtatttggtgttctcggtctcatcttcattggggtggagatctgggccggggaccgcgcaactgtcccaccacgcctgattaagaaccgtaacgtttggggctcgacatggtatgcccttgctcttggtgcttctttcttcgtattgaccttttatgtgagccccctttccgtttctttcttccgccgttcgctcgtcaagctctaacattctcagctccctatctggttccaatcaatcaagggcgcaaccgccttgaaatccggcatcatgaatctgcccatgatcatcgcagtcgtggttgtctctatcctggctggtggcctcgtcaccacctgcggatactacactcccttcatgatcgcctcggccatcatcatgaccatcggcgcagggcttcttacaactctagagacagactcaaaccactcaaagtggatcggataccaggcaatcttcggtatcggcctgggtctgggcatgcagcagcccattatcgtcgctcagactgccctgaaggccgaagacgtacccagcggtacggctatcgtcatgttcgcccagactcttggtggcgctattttcgtttccgtcgggcagaatgtgttccaaaaccagctcatccggaacttggctcagtatgcgcctgacgaagatgctgcgaagctcgtatctgttggcgctactatgctgcgcactgttgttagtggcgattccttacaccgtgtcctggttgcctataatgctgctattacgcagaccttctatgttgctgtcgccatgggcgcattgtcgctcattgggcccatcttcgttgagtggttgtctgtcaagggcaagaaggtcgaggtagctcctgtttgaggatcaggttcggactaggcaagtcttttcgtgcacattgttcaatttcttttctttatatcttttttcccccgttctttgtggaatggtctacggaatattgtactgggccatatatgtgtccactcatttctattgtttatttataattcatgcgtatattgatatcgcataaaaagcccaatcaataccattgctttgcatgatggaatatatgtttcttgatgcttttctatttctcttctttcaccacctattgtacgcagtcagttggggcgagagcgaagcggctgtaattctattagtatccaatttcatagggttcgatagtcccagttgtcatcaaagtctaacctcttccttcctatttaggaacaaagttcatgtcttacgtacaccttgcatagagagattgagggatccctggttgtatagatataaggttagcagcaaggaggtgatatatatttttgatatcaacggtaaattgacattgaactaagctttattttgttcggccttgggtgaacccctttgacctattattgtactaattccttcgataatacgacgctgaaacagcaaaaagaagcaaaatgacacacaaaacctaaactccagcatataaactcaaataaatcccccagatcaccccacacgcacttccaaagaccactcgtcgatctacaggaatgattgtgtacattaagaccgaaacaacaggccgatacttcagacgggcactcataagaggtcgaaaatcctacagaagtcagcatctgtgtaatcagcattgttcaacagaagggcaacttaccaaaacaaccaaatcccacgattttgccaaactctctcccttcagcagattgatgataaccacaaatagcacaagatttacaattgaggcagccgtctgatcaaacaaaaatttcatgacgaagctatgcagcccagatgtcggcgctggcacccattggacatgcttttctttgtctttgtggctagggagcgaaacatcccggcggaatcttgaaaagacagaaagccatgagcggggtgagaacagagatttcagcgatcgagcactgaatgcatttgagagttcagcacgcgtaggaaaccctggatagcgcgactccagggcgcgttgccagtagaaattgggggccacgattaagatgccataggccagaaattggaggagggccagtgtatttagagtaaatggagtctaggactttgtcaatgttgtcatgagcatagaaaacagaaatttttcttactttgttgttgcgctggtcaatcagctgcgcgaggacattggagatagcattcaaaatggttgcctgcacgaacgtcacaagcaatggtgagggcatggtgagaaggccccttggaccaaatccatgtaaatatcaatgttcgactgaacacaaatagaaaggttgaaaagggttgccaagcgcaaccgtgtcctgagaagtcgcgaggttaagggggcaaattaaggctgagagattaggcgacaactttgatgttttccactttttacatcttctgcatcgcttattgtcttgagtaacaacttgactaaattatctccgtcgaaatacaacattcggtccattcttcgccgaggtaaaatgatcggtcagcgccaggtgcccccccgcgtcttcgccctgacgatcggccaatgacatgtcaaagaggaacaccagccgcgccaatgttagccgcatctccataaaagccatgctcttgccaatgcatccacggggcccaatactaaacggacaaaatgcgtgtcgcgcagtctcaatgctctccttggtcgtctgccaggacaatccagagcccatgcaggtggcgttctcaatccagcgctccggcatgaaggtccctggttcccggtagtatcgctcttggcggtggatggagtatgttggtgtgccgcagtctgtaccggcgggtaggaacacgccgtcgaccacggcgccaccttgcatcacttcgcggggaatcgcaccgggcaccgctggggccagacgcaacgcctcgtcgatgcatgctttgagatacaccagttcgccgagctgactgctggttatgatctcttcgacttcgttaaaggcgccgcgtacctcggcacacagcttggccaatgcatctggtctacgaactaagtagaagagtgtggctgccagtgtagtcgaggttgtatcgctgcccgcaatcatgaggacgttggactcgccccaaagctcgggcgtgctgagtccattgccggtctcagggtccttcgcgttcaacaggtaataaaagaaatccttcttggcgtcccgaccaatctgggtacgctccttagcgcgctcgttggcttcaacacgcgaattcataatgaagttccatcgatcgcgcgtcagcttgcggatgaatatctggtccagaccccatgtgtccaggggcatccaaaggccacactatgagagaatcagatgaattgttccttgacgatggataaaaaagaaatgcttaccacataatgcctgttcgcagcacgatccaccaacccaactttatatctcctcgtctcagaaataagcatgtcaaagctcttcccaaagcagagctcgcccatgacatcgtacgagagatagctaaaccaatcacccatgttcttgacattgcccttctgatcatgcgattcgaaatccccgtcatacccagcaagcacagcacacagctgacgcacatggaggagcatcacatcctccatccccttcagagcattatcagaaaaggcctggctaagaactctccttttgcgaccgtgcatggttttatcaatagcgttgtgcgtgttatacacgcccttgatagcagggaaagcattgtaaaaattggccttctgaaggcgtttcccgtgcccatagatatcgtgtaatccacggtcagagttgacagagatgaaattaggcgcaactcgtacgtgtgtcccgtactgactgtgcagcctgtgcagccagaggtggcggtcgcccttcaggccatggtagagctggacccagggtgtgatagatgcgaggaaggggccgttgatacggcgaagtgggtggatgaagcgattgtagagggtgtaggcgatggtctgtagtcaattagaagttgattgggggtatcaaaagaataggacgtaccgctactgctaatagccctaccaagcctcctaggactctttgtagagaaaagcaccccaagaccgattcaacaaacattttgtgagatgatcatgaaggaataagcatagattggctaacatgttacatatcctgtccaacatcctttatactccagctaccgccgatacccgcccccaaccgaagctgatagtcaatgatgacggatccgtactacaaaacaggtcggcctttgctccaattaagaattgccaatttctactacggatagggttctgttggctcggttataggcggttgttttaggatacattggagcgccgttgattggctatgcttaaatagccagtatctgcggggaagcttcacgtcggggtacttttgtggggaggatcctgggtttctatgttctaaggacaaaagaaatgaacttttcaatctgaggccttgtgaaatagtgagggttcattgtcattaatagtcacatagaaatgcgacataagcgatgtatcttttctatttttggcaaactgccgccatacagtagcatcccctgctagcagatattcccctccatcggctccactggctacatatatttctccaggtaagaatgccaccgttattagccgatttacagtgggtaatcagacatccgctccgaggatgccgcccttgtcaggactcaggaatgcgtcaaacacagtcaacatgcttttttttttctcgcatgaggctgtcctgcaacacttatagcaataatgaaaccgacggtaatccctataaagtgcctcccgaggtggtcgatttagagttatgcagacggcccgaaatggtagtttctgaggctcaagcgttggaacttgatgaatccatataagactatgtttgagtggtgtacccatgtattcctccatccagaatccactgctcattgtcatcgttgtcatcttgcacacgtcgccaagtctgttttcgttcggtttgctccgctgcttcagcttgctttatctcgggggcacgccacacaggtcgcatgagaccaccagccgcgagaagggggttacgactgaaagcaggttgtcctcgcgagctgtcctctgcacctccttcctcaacagggtcaggctcactgacctctggggttgattctgccggcgcagaatgatacactcggcggaccttgccacccttgatatcaagactcatcacggtcttcttcctctcccactcaggacgagctttctcgtctatctcgcgctggatgcgctgctgctttttgagcgccagtgctcgttgtgtgggtgtcatccacaacgtcgaggcgacatttggggtctcgaaatctgctgtttcatcaacaaccttggtccgacgggcattttgcgcttggaactggagcagcttgtcccggtgtgctttcgcgacatccagtttgcttggagcctcggacccggaaacaggtctaggaccgccgtcatgatgaacaccttcattgtgtacgcgcatcttctcttgtccacgctccgcccgtagttcccgaatcatgccttgcacttcctctgcggagaggagcggtgtgccacagaatgagcacggctgtagaccctcaagtgagcagatgatttttccgcagttaaggcaattgggtgccgggtcaaacactggatgtagtaacccgtagcaggagcatttgcgtttctctcccagacttggattcgtcgatacctccagcgcagcgatagccgcggtgaggtcggagatgtcattggttgtgagagctgtatttccctttgaagacgatcccgctcctccgccgtgacgtgttgacttgctcacttttgatcgcacatttggtaacatgtccgagatcgtagggccactcgccgatggtggtggcttcggggatgacacgggcaagggggaggtaatgcgcgccgaggctgtggacccacgcggcgatggtgcaagagagggagcagctggttttcgagaagacatatagtcttcttcatcggctttcttgtagccaccgcctacatcgccgtagttgtcgggtcgacgtggtgggccggcagtgtgcagcggagccttcttcttgcccttcttggctcctccgcttggccttgatacatctctgctttgtgtggaggggttctggggtggtcgctggggttctcgacgtgaattaaacgaggagatgaattctagggccgccggggagtcaccgaggaggtttttgagatggtcggcacattcctccctcgagaggctgagcgcatagtcgataacctgagaaagagaatctggatccagcgggataagctgggaaagacgaggagctgcccatgcagtaagatcagccattttagaaaaatatttaggcgttggtgaatgacaggtgaaatgcccgtggatccccgcatttattaagcgtccccggtgcaacccacccaactacataggcatcaagtctctaaacacagtgccaatcaatttcaacctgttctcggaataattacacatccaatgttagtggacatttttttttcaagtgacaaaatgggatcaggtagcgtacatgttaagctggaatccaatgagttcaaaattaagaaaagaaaatattgatattagcacaaatcagttgcatatttcttgcagtgcctctgtcggttgtatctcatgttgtcaagtaatgtacaaagcccacctccctcgtcatcattcatctatgcagatttatccgaaggaaaggccaaaccatgaccagaccaaaccagacccagagacgccatggaacataaccagcccatcaaaaacaaagctcaaacgccgcggacaccatggtagagaaaaagggtatgaaaaacaaatgaaagtttagtcggcgttctcgctcttgatgtcgtcgtcgttgtcttcaactgtgaatgattgcttgagcttactgggaccgggctttttgctggagccctttttgggtccattcagtttcttcttcttggtggggctggggctttcttcgtcctcgtctgcgtaagggcgcttgggtgctgatgaaccgggactattgccattgctagctcccccgtctgtgggagtcttattgcggccgccggtgcgaccaccacagacgcagcgttcaaggtgttgggcgagacgagtcatgacgaagtagcgcggacagataggacacttggtggttggaatttcaggaatggtactgtctcggtcacccttctttttcttggggttcggcatgactgcaaaaagcttgccgtggacatcatggccgggcaggtcaatcatggggacatttgtacagtactcaacgtggggatcgggagggggcagagaattagctccggtggtcggatacatgagtttcgggaggcggcaatctgggcacacatgctccttcacggttcgcatgggatttcctttgaggaagacttttccacggctgaaaatggccgcgtccgtctccatgcgcatacccgcaagcttcttggtgtcgagaacaacttctctcttagtatcggtcgaggtcttgctaggtgcctcctccggcatgattgcgtcttcctccgccttctgtcgggcaagaaccaccgcggaccgcatgcgcgccaccttctcttcgcggtgaactttggccacaaggtcgtggatgatattctggaatgtttcgttcaggatgtcggtagcctaaaaaaaaaggcattaggacccgttatgaattcacatcaagttcactcggggccatcataccactttagcgatcgttccggcaggataggtcggcctgcgaccaccgctgctgttggagtcggccattttcggattgcggccggagatgaatgcgccaaatatatctcgtccggacctgattgaccgacggctgtgtctgcccgcgacacaggtagtgtgtgctccgaaccgctaggtccgaggtttagttctccatgtactggaaatctatgcagggttgacgcaatgggtgcacggatgtaggagagaggaagagagaagaaatccaaaacatagaagccgaaataaaagggagaaagaagacaataaggagagctgaattgtatagcctagtgtaaggcctgatgtcagtgagcttcaataatggggcgaggtagaattaatagccagcaacaataggggaagacaatgtgatcaatgcaggtgttttatcaacgcatacaatggcaagcaggcatcgagaacaaatagggcactaacctatagaggtgtctatttgcatgcgaatcaaatatcactcggggagatgaagagacggatgaggctggagcaagttgttcactgggcttatcttatcgtatctccgcattcgctgcccagccttggaggtgcctgcccaggtggtttgttctttcacaaacgacccctgaatttgctccaagatggcataccagctgtttgcaaagaatcagacaaggcaagcgacttcttcgccgtcgctctctcctcctccgaccaatcgtcaccccatgcggcctcctatccatcctcctccagtacagccgcctcaatcagccgtcgcaaacacgcctggcccaaaacattcaaaagaagagatctttgtcccatatcctcatgacattccagctggtgtggcgacaaaacacccccatataactgtcgagaaagtcagcaccgcgcatatcccttccctgacgcggatcacgggtttactccttcccatccgctacccaaactcgttctacacagcgatcataaccgatccggtgatcgcttctatttcgcgggttgctatttaccatgatcaccctgttgctgcagccccggggtccggcgcatctgccgggacggacaaggtgatagggggcattcggtgtcggctagagcgaatccggcaggcagaggactcgatcaaagaggccaaaatacaagggaatggatgtcccacgaatctctacattcagactctacatcttctctcgccataccggggccgtggcgtggcagcatcactgttgaattcgcttctatttgcatcgtcaccggacggcaatggcaacgactcataccgggtatccgagctcgtcaggcactacaatatctgctctgtcacagcacatgtccatgaggcaaacgaagaggggttggaatggtatattgcacgtgggttcaagattgacggtgatgtagccgaatactatcggcgattgaagccgtcgggtgcgaagatcgtacgactagatttaaacaggaatgagaaagatgaatcatctggtccgacagaaagcaattctcagactacagattctcccggtgaagtagaagacgaagactgggagaaggtggaggcggaggatggcgaagaaggtgaccatggaatacagcatttgaacgaatcgcaagtccttgtatatcaggatgcgccttcgcgcaagcgcaaggctgaatatgatgaccacaagcctcacctcgagtgagatgtgcttcgcatgtgtggctttctgttatacctcggataccccttgcatttgtttatatatctgatttagaatagtgcttgtgtttattcttaatgcgtgcatgatgatatttagttgaatatgagagaggatcgtgacatacactcctacgtgttggagttgagcattaaaggaactggcataatattcatataactgcaacgccatgggtatcaaatcaatagaagacaggaacgctacattagatattatagttctcggcatgcaaaaatatctcatctttcgacgagtccataatcacctgcatctgcagtttggctaccgtgttggcgacttcaactcgcatgctcggtggaccgcagacgaaaacacacgcacgacggccgaaggttttggaaaactcgttgaccatctgcgtgatgttcgggcggaagtaatcagtccgccagttatcacgtccacgtgcgtgataataagcaaaccgtggtgcatgtactggcggcggcacaggttgagatgcgccgagtcggaagtcgaaatttgaggtgccaccactatttgttgctgcggggctgtgaaggttcatgggaggctggtagaattgacgggtactgggcacatgggttgccatgtacgcattgggaagagcagcgacaccgtcttcattctcacggcgcaattccttttctatatcagggttgccggcagcttcatcgcgtatataagccgagttccgcttatcaataccctgaagcataccgtaaatcttctcctgtactatgtcccgtccaatttggtcgtcttgcttcactccggtgaggaagaaatgacagctcacaatgttagaaggtgcgtagtcacggcatattcgtagttcctcctggaaccactccatcatctcggggttcttgagcgcccaaataactttgaccgatttggtgatagccttgccatctcgaatcttcttgatgaggtccagaagttggcttgcaatggcagtaatgccacttcctccggcaaagaaaaccacgtcgtcgaaagcagccatctcgcgctgcataccaccgtatggcccttccacaaacgcgctgtatattttgtaggggccatgttccaaggctttctggaatacctcgcgtgtgaaaccttggaatggccggaaaaccagtatcatgtcacgatacttttcaccatacgcagatgggaagtcgtcgctgcaaagagaggcaatcgtgaaagggtggctctggatcacggaaatccttggtagtcgcaggtagacatactgaccaggtctccaacgcatctttgtgggaatggtgatctttatagcattttgcggaagaagggttatggctgcctcttctccgatcaaaaatgacgaacgcaaaggatgtgtccagttcaaatagaacagccggacgagatatgagatgacccaaatggcaagggttgtgaaaaggtaggcccatgatgacaggtagttcctcgtgtgccagaagagcattgccacaaagatgtacgagactgggatatggacaaagacgaaaagctcatacatccaattgcgaaagactggaagagaatggatacacaacacaagcagaggaaccagcgccgcaattccagtgccatatacataggcgtgtggtgggatacctatgctatagttgaccaaagcaccatcttcccagattggagtgatgtaaaacgggaccatatgaaccaaactgaggaagaggcagatataggctgaccagcggtgcagtccatttaaccgctcaggacctaggccagtcatcatagtgataaagtttgccttggtgctgagcgcaacaatccaggggatcatagctactgcaagcatgcctgcccggatagcgagcggtggcgaccccagcgcaattgaccaatagtataagggctgtggcacgaaacagtataaaacaacgaagacaaatgcaaccaagacaatcgctgtaaccgccaaagacggcaaaacaagctctatgttcccaaccctcaggacgggaactggtcggtagaagatccatcgcgtcaaagcaattgccttgttcaagggaactattcttgcaagaatagattcgtgcctcttaggtggagagactacggtcggtgatggaaagaattgggcgttggaagcatcagtgcctgcactcgggagctcgtactcgtccggtaccgagtcgtcgcggaagatctctggtcggttttctttatagagggcaatccgcatcttgtcgccccatttatgccagcatcggacgaaagttgtgattatcagtagcacgacggcgaaatagacaaatccgactccatattttgctgactttgaccatggatctcgctgcatctcagccgcctcggctgtagtcgtcgatgcagtgatcgcaacattgatgcgcttggcaatagtgctcagcattttgaaatgccttagtcggtaccgatagtgatatcttcctgagatttttctagtcagatccatcccaagaaaagtcttgcacggggtaacctacctttaggtatcacccacgcataagaggcttcctctcttatactatagtcgaactgagctcatatctttagtagagctatcaatattgatttcatcaaagtcaaggcaacggaatgggagttttcgagggaaattccgtctaaagtatgaaaaaaggaagcggggagtcacacaagcttgcagtctcggcactgtgatagcctaagcccaacaacggaatattgtggctggtcagacattgacccaatcgaaatcggtgattgcagaccaatttctagagcacaggcgtctcgccatggtgatagtggttgcagtgcggagggatatggtgtgacggtttaggctttagcgctctgaagcccaatcacacggggcgatatcagcaacagagtgattcgatgtgactgagccgcattagcgtggtggagaagatgcagagctcattgatatttttgtcgaagatgctcatccaattataattgaactatgatgcaggtatacaaaatagttcataatctccggctggtcgtgccggagattagccgaaattatggaagccatcacaactatgttgtatgtatgaataggctctatctgggttagcgtctatgactccgtgaaatgctatagcgcgaatagatcgaagaagctgtctatgcggactacatgtagggtttagtagccgaagcggatagcaaccagtagtagaatgtagttcccttgacgatgaactcacagtgatatattgacgaattgtaggaattcagtactggaaaaccagaggtttcaacatttcaacattctcaagactgtcatttccggcattggagctgaggcacttcgtcggttcctgcatcaaatggttttatcatgtagtatacagcagatatctgtcgtataatatcgtgtgatatccagactgaaacatcagacacccctttatctagaaatttgttcttgttctcttctcataaagttgttcctccagggctgctgtgaccccgcgaaactcttggcagataaacagttggtgcctggggcaacagtgacagcttcgaccgccttcgataggaaattattctgccatctcatgcttgtcggctttttctgcatcttcgatcatttccatatcagtctttgacgaaagtagagacgtttcatttagccatggcatcctccactactgccagtaatctgacacctccgtcattgtcccttccaccatcacaattcgctcgcctccaacctcacgcctaccttctcgcccacctctctcctccaccagcgagcaatcaaccctcaatccgcgcgaacggtcgtgccgcctcacaatttcgtgtcacatccgccaatgccggctctctaactcacacaaacggcagcgcagtcgtacgaatcggcgacacagccgccgtctgcggcgttcgcgcagagatcctacacaccaaggacatcgcttcctggagcgtattgcaggcctcgtcggagcacaatcttgacaattcaaattatgcgggagtctccgagtcccaagatgaggaagatcgaggtcatattcaagatctgaacctactcgttcccaacctttccctcagcactggctgcgcgccaggctttacacccggtgcaccaccttctgcgctggctcagtcgctctcccaccaacttctttcacttctgcacaccacacgtctcgttcgagcagaagacttgcgcatctggtatcagccaccgaatctggagtcagaagaattcggcaatgcgggtgaggggatggacgtggatacagaagagagcgggggccccgagcgggagattaaggctttctgggtgctctacatcgatgtcatgatcatttctctggctggaaacccattcgacgcggcctgggcctctgtcctggctgcgcttcgggacacgaagcttcccagggcctggtgggatgccgataacgaaacggtcctctgctcggacgatgttgccgatgcacgaaagttgtctctgcgtggcttgcctgttgccagctctttctgttcgttcgagggcgacgccgctgctggctggcgggcggttgtcattcccagtgctgaggagcagaagcagaagaagagcgcacagcgaaggtggattcttgcggacccggatggatacgaggagggtttaagtcaagagcgggcttctgttgttgttgataaagagaatgggaaaacggtcattgtgaagatggagaaacatggtggttggactgtggacagtgatgatctgcgccagcttgtggatgtttctgctcagagatgggatgagatgaagcggatactagatcaatgctgatcgatttgatatgccttacaaatgaatgataccactacaagtatttcttgacattttgcttttgggatggagctgtgcatcggactagatggaaatggtggttgtcatgtgaatagtctacaaaatattgaattgatcacttcgctagtttgctgaactcttattcatcatgctgcgtcgtcttctcttcaacggcggttcgttgtccccattagcatccctagaaacagacacctctgcatcctcttcctctgtggaagttgtcggcgaattgaccagcatttcacgtttaggcttgccagggattgatacggtgaaggagatcaggtccgcgctatcacggtccttcttgggcttcttcgtcttggcattacgcccgccttctttcgatgatttcgtttcagatttcgagtcatcaatgttctcttctttgactttcatagcccgcattgcattctcgtcttttgatgcacgcaggtagtcaccggagaagatgcgcataaagaggctcttctcttgagaagaaggcttgtcctcggcttcattttccttcttttcctcttcaatgtccacctcctcggcatcagagaagtcccacattgtgtcaatctcacctcgaataaacgcagtaccccagggcgatatcaaaacacccggtaccaaatagagaagagctggctgagcatgattcgaatattgcatggcaaggagagtggtgaccattccaacaacataaccggctatgctagctttaaagtagatctttggaaaacaccgtgcatcatagtagggaggctgaagttccggctggagtggcttgactggtggcgcccagaaccgctctccccaagcgccgattgctgactgatactcaggcttgacagttgcttggtccgacctttcaagacgtgccatttgagcgcctttccgctggtaataaaggaataggtcgaagcgtagtgacagcccaatcatcattcccggaatgacaatgtcccccagtccaagcatggccaacggcacagagccaggagcatcacgagaggtgggcggccggggaaacaggagcttgatcggtacatccaacttggttgcaacagtgaccatcaacggtgtgaagaagacaaagtagatatcatagaaaaataaggatcccataatgagcgttcctgtccagaacgtggagggagacatgaattgcagggtgccatagcagaagcagaaaccgaggaagttggtcaaccaccatgggttcgccacgaatgcaaagtatcctaccgccgacaatgcaagacttccgctgacgatatcaaggagaccaacgagacatctaaagtcaaataagccacgtatatggcctcgcacctttagacgctggtaagagacatttcggcacttccaaagcagtcctaataccatacttgggagtggcagataacccaaaatcccaggaagaggtgaattccggatagagtgtgacttggctggatggtcctcggatgccatgaaaaggtgttcggactgtttcgctttccacaatcgtccaccttggcgataatatctaggaaacacaaatgaacgaatcatcaatagcacatccttcaggaatgcaaaggcaaagaagagtcccatttgagagaagtagaaactaaggatcttgttcaagatggctggatcttccagccatttgatcaccaagtataaaccacccagggtgagtcccgcagtcaacgggaatatcagggcatctgatggctcaagcccttccatcttctgcaaagggccatgtccttcttcatcatccgtgtcattttcatctttgtccttgtcgctttgtttcttcgcgggtttagcggcggaagaaggtcttgtcaaagaagcatgtgcaccgatccaaattggaaaaagagcggaaacaagtaggtgtccgtaagttggaagaagtggtctcagacggtcgaagtggtagaaggcttgtccaagaagttcggcgacagggctgacgtcagccatggtggacagaaaattgttatgagcacaggaaaatgataggcaattgaagccaggaaacaaagacagaatgaatcagaccataatgcccacgaaatgtgggaattctttgaggttggttaccagcgcttagtgaccaggcacaatttaattcaccgctttctctgaagatccctacaacatcatcgtgccaggcgcccaaaacacatgccgtgtgttggtgagccccaatcaacgataattttcactcaacgataaaattacaaaatcaggtagcttttgtatagtatactaaggaagatacaaaacctcttccttttctttaactttgacaattgtaaattgtagtgtggattattgaatctatagatagggcggtactggttttctgccagacaaattggcccaatggggtcgctgcactcatccgtatcgttggtgatttcgtttctcgcaaactctcagctctgttcctcggctcttttatttacgattctacgctacatcctcatcatgacaactgaggtggcttttgacacgtctatggtaaattgtacttcgttgttctcccaatcacttactaacccatagcaggggtccttctccgtggagctctacaatacacatgcgcccaaggtatgagctcattctatagctcctagagagtcctcactaatgtctttctcttcagacatgcaagaactttgcaaccctcgctgaacgtggctactacaacaatgtcatcttccatcgcatcattcctgacttcatggtccaaactggcgatcccactggcaccggtcgaggaggcagctccatctacggcgagaaatttgaggatgagattcgcggagagcttaaacacaccggcgctggaattctgagcatggcgaacagtggaccgaacaccaacggcagtcagttcttcatcactctcgcgccgacaccctggctggacgggaaccacacgattttcggtcgagtgaaaaatggcatgagagtgatccagcgtatgggactggtcaagaccggtgcggaggacaagccagtggacgagttaaagatcattcgggctcgtgtagttgaagcaggcacacaagagtgaacgtcgtgcgctgcagcttattccatcggattacggtggagggtcatgcacatcaagtatcttctcttgggggaaaaaaaacaagtgttacccaatttgtgcggtgcagttgcaggcacaaccctcggcgcgcccggcccaagtcatgctagagcagcattgtcttgttgttgtctcgaggtgctctatccaagccccctggactctacgaactacaatatcagagtgacagagcaaggtatcactctaataatgagattatggatgtatcactacaaaacgaaccgcttctatcaaatgtctccatcaagagcagcagatacagagtgacaagaaatcttatctaccactcccaaacgaagtccagtgaaggactgcgtcaatgaagaccaggctaccatagtatagtaacccattctgtgcagaacaccgggagtggtatggaaggagaaaagtgttccgccgaaatttctgttcatatagcggtgtagcctaacctcttttggaactgctgagtaatctatggtctcacctaggtagttaagcataacttcccgcctgaagcagataggctctatttggttcggttgtctctattatcgaagtaaaccagcgtaagcatcatctcctggtgttggtagctacacataagatagagcaaaaaataaattccgatatcggtgtgggtggctcgcttacatcaatagaagttgttgcgacaatcattcatttttcatcttcccccttcttgatcgaggagatagaggatagctctgctcagtgccgctgaatgacactgccatggtcttcatcttcatagttgcattgtaacgactgaccgtgcccgtccgctctgcgaaaggcgaacgaacatctggtcgcaattatcacccatgagacgttttccttgaccattcccaaccgtttatattctttcaatgaccgggttttcttaaagtatgcgaaactgctcaggttatctatatgccatccaagctttcaactggtgaagcgattctagtatgttgcagaatagctcttcctcctgtacacctggagtatatatattttcagaggcatcctaaactatccaactcgtagacaaacagagaaaagtcaatgtaggagatactcaaatcgtataattcccgtaccattcatgtcactgatgaaaagccgagttcattttaaccacgccgtacatgtgttttctttatgcaatgttcttcgacgtcgattttagtcctatggtctctaagtggggactaggtgaccgccttcgctcacttcccgcgtttttctccttcaatttttttattctcttcttctttccccccaaaactcaagtttgtgggatttccactgtttgagcttattggaagactgagaatgtttcagtggcattaaataatcatctcccaattctcaacctcctgagagcttgagctgccaaatttggctgtaatactcaaacttacctgcagctagagcttcctgattttcataccatggaaactctgtcagacacgacttgggatgtgatcattcttgggactgggatttaccagtcacttctggcactgtgagtgacttttctagggtggcggtgagttgagcactcacactcccaaagggccctctcacgatctggaaagaaggttcttcacatggactcaaaccagtactatggtggttcagatgcagccttcagtcttgatgaggcccagcagtgggtagagaaagtcaataaaggtgagttaccctttttatggctggttggctcatggctaatattatgttgccaaatagacacacatatatcaccgttcaaagatgcctcaatcttcaaacaggatgcaccccctttgtccgatgatacaagcatttctcccaaacttgcatctagtcgtgcttacactttgtccctgtccccgtatttcctatatgcccgttctcaactaatgtcagcgctcgtatcctcgaaggtctttcgccagctggagtttatggctgttggaagctggtggatttacgcccctgaacagctagagtctgaaaatgacaaactcggtgcagaaaagattctctatcgcgtacctggcaaccgggaggatgtgtttgctgcaaatcatatcagcatgaagtctaagagaaccctcatgcgattattgcgtcatatcacgaaacccaatgaggatgacgcttcaaatgaagatgccgatatgtcaatgtccttgagcgattatcttgcttccaagttcaacgtcccggaggaacttcacaatcctctgctgtcgctgtccctgtcgcaactttctcagcatgatacttccgccagctatgctttgcccaggatccaaagacatttgtcatccattggccatcttggccccgggtttggagctgtgattcctaagtatggcggtggagctgagatactgcaagctgcctgtcgggcatccgctgtggggggcggtgtatatgccctggatacgcaggttaatgattgcttatggcgcacaggctctgaacattccgagtaccgttttctgttggaactggccaatgaagggtctgttcaggcgaaatacttgtttacctcgatgtcggatgcctgttctaaagagaggtcaacacccttggtcgaggttgcccgttcgatcagcgttgtgtcggctactttcccgtctcttttccctctaacagttgagggtgctcctgtgcccgcaactgcagttctcatgtttccaggggatacgttgggcagcccaaattcgccgccggtctatctccaggttcattcgagcgacactggcgagtgtccacagcagcagagtaagtcattccctatacagtccagcatgatatcccctcccgcccgctcgtatgatgatttttttcaaaaacttatctacattgcctgaacttgctatgttgaaaaccttttcacctgatcacgagcactctccaaatttgtttcttcagcaatattgtcgttcatatggctaattgcatgtcacaggtgttatctattgcagtgtggcactacctgggccggaaggccaagctcttatcgagtctgctgtggatagactaattcgggcagaaggtatctcggccaacgtgctgtggtccttgcgatatacccatagcggctgtatcagcaatggtgagccccggcatctcacggtcggggatggagttcctgacggctaccgtttccctccgtcgagccttgacttggcattcgaagatgacacattcgaccttgtaaaagaggcttggaagatagtcgtaggagatgaagttgatgatgccgattttatgatgtttgacgatcgcgatggcacttctgaccaatgatccgtagcatgctttttttatgatcatactattacccatatttccctacagaaatagttgatgaaatggtttctgttcgtttctagggaggatcgttatataaagtatctaatgctctaagaatcctctacaaagttatcgatttactgcccaacaatctcacacggtgttagatgttattatataaaatatgtatgctgtaactaactagttatggatcgcatgtgacgcataattaatatcggcgcaaagcagttggcagaacgccccatacgtcatgtcatgttaacctgattgtcgatatagatcttccgaatatctgttgttttcttgaacgtagattccaactaatctttgctggaataaaacttctatcctacactctcatcgatcgcaaacatatacctatcctcacaatgccactcgataatgtcaccggcggcgtgactggacagcttcctgccgaccaggcccaatcaacaacaagcggagtggtcaagaagagcgtaccaaaaaagctccaccgaacgacgaaggacttgaccgaccctgccctcccaggtcaatttccttccgacgatgctcccccaaaaggcgagggaatcgacaatgatctctcgttttcatcgatatggtccaccataacagcatggttctctacactattccctcgcgcctttgattatctcgagtcctacattcagggactggtcgcctggctcctccctccaccccgccaggctgcgttatatgaagctgcactgaagcgccctgccgcaacaaccttaatcgtttgccaaatgatttgctgtggagttcctctactggtgttcttggctggcgtgtttgtctttgctgcggtgtcgatattgctctgggctattctgtccttgctcattcttggtccggtgttgttggtcacaagcatgatgggcatgtctctgtggggctggggttggatcctctatgggttggtcaaatggattgatcggcgattcttgggtggcataattgcacgcttttggctttctcagacaaattcggagtcagacgatgtagaggatgagcccaaggaggagaaaaaggacgagtaatgtttgcgaatttctcggagtttagaggacatgtgattctgtattctgaattatttagggcataaaattgacattgacattgaacactgaagagcacgatatcttattcatatacacgctcagaatattcgaagagacacaaatggtaccccgatgaaaccctcaggcatcgtatatgtgatgttgtaaaatacaaattcgttgacagagtgatcggtgttgtaagtgatcgtatatttaggttgcgcgtttgtcaagaccttgatgttcaaaccaggtagaccttctagtccagtcacattgaacccgttgttgactgtgaggccactgaacaagaagttgaaagaaacaggaccgtgtgtagatgttgcatttggatatgagatattcaaagaccgaggggcggccacagcatgaatagatgattctgtaacccaatgggaaatgcagccaatttcatgatcatcaatagcccactggatgactgcaggattgaattgactggggttgatactgggacccccgacaactgtctcggcaacagtttctgcaccaatagtcacgttcttggacatccaagcagtgatattgcgaggataagtatcaaagggcggcgagtaagcctgcgaggtatacatatgctcgccagggaatttgagcaaattttcctttgcctttgcaggtagcgatttcaccatttcaggcattgacagggcgaatagaggatataacgccaaatcatcttgatgaaacatccccagctcctgctgagggacgggggcttgttcgcggccaataacaccccaaataacagcaccaataagagatgcatactccttcatatcgtagccatatgagcgatcccaagggccagcaacattcttcagattcgcattataaagctgagcgagttcattccagctgtatttgagcatctccggtccatacttcttcaacaagctgtcacttgtcccatactggttccagagcgccagtgcccacatggcaacaccagcgtatgtcggagaattgaattcagacaatgtgtggtgcatactccagaggtcgtagatttcctgtgcgaatttctcaccagagctggttaagtttgcatctccgactcgtgcaccaacccagttttggagaatggttcgcatcaaccagggattggagtaacaagggtaagaattgtcgccatcaactcccccgacacgatagagatcacccttggctgcgatctgcagggacttttccaccttggagaccgtcgctgctggaaggagatggccgtaatcattcaaagccacaatccaggcacatcctacaaaatcgcggatgtttggatcccactgaccataattatattagcgaaatagtggattagactaggcataatcagcttaccgagctgtatgggccatcattgggatatttcagtgtcccaggctccggttctgaaggtgcttgttgataatccccataccactgtttagacggatcgacatattgaccagagatgacattgtcgaagatgcggacggcttttgcaacatcaccgggtccgtttctggctagcaactgaggtgcataccaggctgtatgccgactatcatagcgtcccggactactggttgaggtgatcaaatagccggtctcgttgtcccagtatttgtcattccattcaatagcagcattgaacatttccaccgcgtgcgatgacgcaccaaacctggatgaccagctgtctagtggagcagcagagacgatcccggtgttatggacggcattgaatcccagaaggaccagtgatagcttcatgatgtgttggcaatatgaaaatggcaggcaaagagtgacttgcgaaagaagctcaatttctttcgctcaacttccccctgtgcctttgctgtatttatagcattttcaatttggctttcggcatatctcgtcaggtcgattgcattgacactgccgatgcctagcatattatgtttatctcagcgatatccaaacattcagaccccggtgatttcgccgtgatctccgaatatgccggttgctatccagagaatgattcaagtattctcgccatcttacactactctcacccttatctttagtgatcggcatccggtaattcctcagcattgccgatttatacccctccctgaatccttcagagcttccccgcaaaagcgaaaaataattccacctatgatcttatacaaagccgcagaaaagataagaccagctccatttgctacacatataatataagtataattacttgagccacttggaaccgaaagcgataatctgataccgagtcacaaacaatacagagagcgcgagaatcccaacgccaaaggcccactttgagtgagcgaaagtcgtatcattgccatcccgatcaaatggcggggtgacgggtgccatcattttgtgagccttctgaaccgagtaggggggataccgcgcagcgagaagcccctccaaccatgaaggcacggcgttgatatgcgtacggagatgagagaaagtcaagataccgtgcgggccatgatagcgaccatggccggagttcccaacaccaccgaatggcacatcgcgagcagctatatggagaccgcagtcgttgaaggtcacgcctccggactgggtttcgttcaagatgcgagccttttcggattcttgagtagtgaatgcgtagatcgcgagtggatgctctcctgaacgcgtccgagagagagcagtatcgaagtctgcatcaatgatggggagaatcgggccgaaaagctcttcggagagaagggaatcgccgggtttaacgccggtgatgattgttggtgcgaagtacagactttgacgatcccgctggccaccatagacgatttttccggaggtctgttgaagtagattgtcaaggcggtcgaagttacgctggttgatgatgtgggtgtaatgctctgcattgtcggctttgcctcctaggaacgtgtcaaagtatcgaatcaaatcagcgacaaggcgttctcgtacacttgggtggactagaacgtggtttacattcaagcaaacctgtgttcagtcgagacgagttagttgatgactggaacgtgaatggtgtgagcctacctgtccagcattcatgaatttagtaacggcaatgtgttttgcggcgagatcgagattcgccgattctgcgacaatagcaggacattgaccacccaattcaagtgtgacgggagtcagatgctttgctgctgctgcatggatgattttggcaatattgggagatccagtgtagaaaatgtgatcaaagcgatgctcaaggatatatcccatttcttgtgggccagcggaaatacaccggatcgcatcttggtccatgtattggggaataatttccatcaggacatcttgagtggcacatactacgtccgatggtttgagaatgacggcacacccagcagcaatcgcagcagccattggctgcaggagcagactgacggggaaattccatgcgccgataatcagagtcacaccaagaggttccttgcggacagtggctcttcctacgaagttgagaggatcggatttttccggtctttcatccttcgtccactcatccagttttttgagggtgcgtagaatatccgcttggatattagcgcagtcgccgatgtaggcttcttgatagtgtttgtgtagatcgatatagagagcgttgcagatgcgcgtcttgttgtcctcaatcatccaccaagcccgtttcagttgacgacgtctccattccttgctcttggtggtgccagatgcaaaagtaccctgtacaatttgatacgcctagaaaatgtgaggggtgatatcaaatagtatatggatgagatttacctgatcgaactcggccgtagtgctgaaacccatggtgagctgtagagatgtggagaggtgggaggaagacgaggttatggggaatactcacacagccgtgttgaacatgacctcctgaggaccctggtctaagactgcagttcattttataaatatatcatgcatgattccgtttggttaatttagattgaccttgagatttttatggtcgcgaaatgagtctcggggtgagatttgtacgctccccgaggccgaagtgcattattattgcattaggaaatagaatcgccatttccctttcctggatgtcgaagatatctactccgtagagtatgccgatctgaaaactaggaactggatattctcgttgaaacgtcgggtttggccatgctaatatgcacagttggggttctatctactatgtagtctataactatccagtttagatatacaccgaagcctgcaatagctgtttttatagcatttgccgtctgttcaatcatcttagcatcaataagctacctctagcctagtaggagactctagattccttatccaaagccccttttgccaccaccaaaccctttagataaacaccaaagtgggtattccaatatcgcagcgaatagaaaccaacaaagataggaatgccaataaatacagagacacttatctccttggctcacatataacaggggagctgctcctccactcatgcggggtagacgttgaacaatgactgcaatttcgagagctcgtacaggttgctggacatgtcgtgcacgacgtatcaaatgtgacggtaatttcccatcaagtcctgcatcaacacagtcctaactgaaatcttggttagaaacccatccaatttgccgtcgttgcgcccgtaacaatgccccatgcggatacggacttcgtctggtctggcacgaggaatctttagcccgaggcatctgtcatggaagagcaggggtatggtccaagcgaaaagatattcgaaagagggaactggaacaagtagaagatacatcatcgccatggacggagcatacggccgaccggacttggatgtttctgaacacgacaatgaccgatctccagatccatttcgatggtacccagcccaattacaaaggcatgaagccaatttctcaaccaagcccgttgtcgccttggctgaataccatagctcctggccagcgatcagattgcgatccggtgcttatgtcttatttcgaacacatcatctgcagcagctcaactctcgtcgatagcgcaagttacaatccatatcgatatctcatactccctatggccctacagtctgagggactataccacgctgctctagccatctcagccaataccctcaagttgtcggatcagcgataccggcttccggcattggaacatcatcaccgggcactaaatcacctgcgcggtctactgaatcaagatagctggacggaaaatgagctggatgaaatgcttgggctggtcttgatgttatgctggttcgatgtaagattatgccttgcttcctttactatgagaatctcctaattccgttgcagatatcagacagcagtcgcccttcatgggtcacccacctcaacggattccaaaatttaatgcggacacgaaaagaacgccccggtcgctcatgtcacagtcaagaattggcaagtttcttcaatcgttatttcgtcttccatttagttctagcccgcactgcgtttcggctcacccctgccccatcccatatatcgcctctcttgccggacagtatactggaaaaatcagacatcatcgatccgtacatgggattgagccccgctctcttattgatgatcgatcaagtagccgaactagcgtggtctcgtgaggatggcaacataaaaatcaaccgtaaagatgttcatcaactcaagacggacctcgatagtcttcaacaaaggatacccacagagcatatcgatccgaacatggagtgtgcggcaatcgcagaggcaaacaggctcggtgcccttcttcttctgcacgaaatctgttcgaccaaagctccgattaatcgctccggtatcccgacattggaatccgaagagaagaatgtttatgttgaacggatattgaccctgatgttggaaaagaagggaaatatgatgcgaactgcagctacgcctttatggcctctcttcttggcggggtgctgtgcctgcagggaagaggagagggtcattgtgttgcagttgtttaaagagctggagggtattcgtcgatttggggtatgtataatcttctgtctctttctagttgattgactaacattattattccccagaacattacccctgcgattgaagttgtcgaaatggtctggcgccagcgggatctgtcggtgcaagatgaaagaaaactccagaagaagcttaatgcacagcggcagaatgatcccctgcaagagagccggttttcgtgggagcatgctatggtcatgctgggtgggtggaagctcagcttgacatgagcttttatgtgggtaatgaagggttttattatgttcttgtatatattatttgagggatggtctcaatttgtatagcccgcagtcaaactgtgtttaattgttcgacttcttgcacctttcatttagacaaatcatagtttagaagcatggcttctttcatgtgcatgtctacccttccaccctgtaaggtcgctcaactccatttccggatccaagtgcgctaggttcttcgcagtactcttttgtccagccctccatttccattgacgcacaatatctgggtcaagagttccctcgagcaaatccgcgacatatttcccaacgacaggaaggaacttgaacccatgtgctgagccaccggttgccaggaagagactttgatgagtgggatgaggcgtgacaaggaaatgccgatcagctgtatcagcatcccagcaaagccgtgtatagcagaagggtctgtctgcaagctcgggaaacacgcgccgtaaattccggcgcatctgagcttcgatctcgagagggaggccatcggtgggtgcctgcacgaaggtgtgtgggacagaagtggtgataccagacttggtggtttgcacgttggtgatgaattgactgtgagccatcttgaatatcccatcttcaagaggtgggaagaagtagcccagctcgaggttatccataatgggcattgaggcatagtgtttcgtttcagaaggggtgagctggatatgagcgacactgtgtcccttggcagtcaactggtccttcacgtctagcagtgaaggtgtccacgcgcctgcggctaggatgaccacatccgcctcatgtctcgtgccatccgcagtgacgactcccttgcactcgcccgtgatatcatctagtatcaactcttgcaccctcccctttgtgtcccccgaaatatattccacccctttctcctgagcagcgcctgccatccgctcgatggctgtaccagaagctgcccacccggctgttgggttccacacattgatattccacccgtccagcttgcccgtgacaacagaccagcgagcacggatctggtccggcgtgagcttctcaagaccctgtactccaagcttcttgcatgtctcaatcgaaccctcgacaaagggccgggacaggttcgctgcgctcaggatccacccggggacatgatagagcccacgaaacagcggccaagaccgccacgcttcgatagattcaattccaagacgtgcgtatagcggttcgttgtaatcgctgcggatgatcttactgatatcggtggaggctgcttcgcaggaggggggtgcgtatgggtcgagcacgcggatggaggtgtagccgcgctgtgaaaggtggtatgcggtcgaaatgccgaagcagccggcaccgacaatgaggattcgcgtgtctttttccatcatgtgagctggattgttgtggtgactaggtttgacttctcaaactttgagggtggcgtcgccatatttattgaggcatttccgccttctttcggagaatctgatttcgctaccagcttcctcatgaacaatcaaaggtatcatggagatggtctcgtgtgcggggaaataatcgactgcttcgttccgaccttccgataaaggtctcactgcccggagatactcggagaatctccgagtggatgctcgtttcgacctgcattcttttacctttaccccagcatttcccccaactcaaagattgcccaggtgcttaatcttatttgtttccgtggctctgggatggaaggaagtatgccaaagataacaacgttctctcgggcgacaatgaaatgaatggctgatatcgcagaaaattggctaatcgtacaaagtgtccactaataactagatcattcgtgacaaacttcttacttggatatgctgagagcttatagatacacaggtatcatacttattaacctatagacgttttaacggtctacgggtctaggtctagaatatcgagtttcttctgaatcataggttgtcctctagaagagatagacaatcttggcttatttcagagtgatatgataaaatattgactaattcctggttcaaagggtacatgtatatcagaattgccattcattccattgcgtacatttgccactctatccatacagtatccttatcaacagtaacccacatctccacacacatcccaaggctcactatcctaataagtataccggaaagagcgtttttctttatcagtcagatccgagaatgcagcttcggatatctccacatttgactcggcttccttgtcacggcggtagttttcccatcggcaaagagccccataggaaataatggcaactatagccacaacaagacaggccagaagaccctcatatcctcgagagtaggatggtgcatcatcggaacggaaacactggggaccaatgatattgccaatacaatacgccaagaagaagatggcgttcatggtcaactttttgctatggccactggtattggccattggaagtgaagttgacaacacgtacggcgcccagtaggtgtagaagacatagtatgccgccagaagcccatgctggttctcacgcggcagcttccacatcagaatagcgcagatcatggggaccaagttggccagggcgataatggtacaacgggagttgggcacgctagcagctaggaagcccagcatgatctgccaaaccgttgcaagcacaccggtggggataccaaggacggtggtgatcaatgaggagtaccctagacccttcacaataatagccgagaaagtcaccagaccaccattggggatgttctgggccagcgaaaacagcgccagaagccaagtcttggggtcgagtaaacactcgcgcacttggtaccacttgatggttttgtcttccatgccggtattgttgtctttgacgcgctcgaggcagacgaacttctcgcggtccgagaagtaccagcattgcacgggcgaatcgggcaagaatatgtacaaaacgacggaccaaaggacggaaaatccacctagcacaaggaagagcaatctccagggtcctaccgacgtgttcgtttggccgataccatagctgatcaagcccgagaagacggaggagagctgattgaaccagaatgcgacacgaagaggctgctcgcttgtcttccaccacatgacagtcaaaatgctggagattgggaacacggcggcttccgtcatgcccattaagaagcgcacggcggctaggcccccaaagttctgcgttgccgcagtacacaacagcagaattgcccagcccaggaccatgcccacatacaatttagccacaggaagccgctgaatgagtaacgctgtagggtactcaaaggcaaggtatccaaagtagaagattgagcctacccaagagtactgatcgccggtcaagtgggtatctgtcttcatgccgtagatggccgcatttgagatgatgactttatcaatagcggcgagaaccactgtcaccatgatcaagggaatgaggatcagatcgattttccaaagcacacggcgcgcttcggcctcggtgacaggttccaccgcaatggcagggtccaggtgagcgaggaagtgtgccgcaacatctttgccgttggttttctcttgggcttcaaggatttctccttcttgggccttttcgtgatcaagggcgagttgaatctcgggagggttggtatgtttttcgtctgccatagtaaaaagggtgtatctgtatcaggaggtagaaagggatgcgtacacatcgaaaacgaaggagatagtcatttgggatggttttatactttggaacatcagagtgaaagataggtccaaggttacccagacggttatcatggaaagtgaagtgaacgaaagtttgggtgcgccaggaaggtcggaccgactgataagcgcatctccacgttcctctccccgctctatctcggtgttcaccagccggtggattagattgtggcgttctttttttcgtcaagttacttcgcttcgacctgctgattagttctaatggagctaatggagcttcataaaaggaagctttggtccttgcgttctcagggtatctgaacatatcccatatcatgtctacccaattaggtgccccaagcatcaagatcgccatcggtgagtcacttgcaactttataattcatatgatatagcaaggtgttaatatcccttctagatcgtggtggtactttcaccgactgtctaggtattgttgatggtcgcgatgaggaaatcgtcgtcaaactgctttcgcaggatccagccaactatgccgatgctccgattgagggcatccggcgtattctggagcaagcaacaggcaaaacctttccccgcgatcaaaaactcacaactgccgacttctcggatgttagcatccgcatgggaacaacagtcgctaccaatgctttgctcgagcgcaagggagaacgtcatgcactcttgatcacaaagggcttcaaagatgctttgcgtattggaacccagtctcgaccaaagctgtttgcactcaacatccaacgtcctgatgttttgtatgaggatgtggtcgagattgatgagcgtgtcacaattgaggattatcaacagaatcccaccccggacaaagagagtctgcaaaagtctttgcaatcagatgcctgtttgaaaaaaggtgttagtggagaagtggttcgcgtcttggagcctcttgacgaggaacgtacaaagcagagccttcagcagctgtatgaaaagggctatcgctctatcgcggtctgtttggttcactcatacacattccaagaccatgaacttgcaattgagaagattgccaaggaaatcggattcactcagatctccctttctagccaactcttgcccatgattaagatgacatctcgtggtgcttcggctacggcagatgcgtacttgacgccagtcattcagcgttatattcaaggcttccgctcgggtttcaaggacggactgagctctgccaatacacgctgcgaattcatgcagagtgatggcggtttggctaattttgaaaagtatgttgacattcaattactaggaatgtagaaaagaaattttactaatctcttatagattcactggtcttcgtgcgatcttgtctggcccagcaggcggtgttgtgggatacgcgggaacttcattcgatgagacagatagaaagcctgtcattgggtgagtctaaatttaccttattctatgaggggatcatcaactaactttccagattcgatatgggcggtactagcacagacgtctccagatatgacggaaagctggaacacaccttcgagaacaatatctccggtgtcacagtgatggcaccccaattagacatcaatacggtagctgccggcggtggtagtattctcttctggcgacatggattgtttgcagttggtcccgagtctgcaagtgcccacccagggccagcatgttaccgcaaaggaggccctttgactgtgactgatgccaatcttttccttggccgccttcttccagcatacttccctaagatcttcggcccgaacgagaacgaagccctcgatgtcgaaatcacgcggaagaagttcacggagctcgcagagcagatcaatgctgaaaccggacaaaacaagtccccggaagagatcgcgttgggcttcattcaagtagccaacgagtctatggcaaagcctatccgagcccttacagaggcacgtgggtacgatacttccgcgcataacctggcctgcttcggtggtgccggaggacagcatgcttgcgccattgcctcttcgttgtctattggaactgtcatcatccatcgattctcgtctattctctctgcctacggcatggctcttgcggatgttgttcacgaggctcaagagccagcatcaggagtgctggatcagacagccatggaaagcatcactaagcgtatcgctgcgttgaagtcaaaggtcactactgcgttaaccacggacggcattgatgaaactcagattcagcatgagatttacctcaatctgcgataccagggtaccgacaacttgctgatggtgctcgaacctgaacacggagactttattgctgagtttgtcaaagagcacgagcgcgaattttctttcacattccccggtcgtaacattctcgtcgaagatatccgagtccgaggcgttggaaaggcaacctctattgcgccagaggcacctcaacaagaactcaaatcagtcagcaaaaagcccgtgggcccagagaagcaggatgattcatcttctgtctactttgccggcgtcggtgaagtcgctacgccggtcttcttcctggataacatgcaaccgggatatgtccttgagggtcctgcgatgatcattgataaaactcaaactattgttgttgagccaaatgccactgctacaattctgtcccggcatgtgatcttggatgttcaatcttcgaagaagcagactgcggatgcaacagtcgtggatcctatcagattgtctatctttggtcatcgcttcatgtccgtcgctgatcagatgagtcgcatgttccaaaaaacctccgtgtcaacaaatatcaaagaacgactggacttctcctgtgccgtgttctctcccgatggaaaattggttgcaaacgcgccgaatgtgccagtacatctaggaagtaagtcatccccatttagaaaaattctcttttgaccaagagaacttcatgctaatttcttcttcaggtatggagtatgctgtccggtatcagcatgagaaattcggaggcaatttgaagcctggcgatcacattctcaccaaccatcctcttgccggtggaacacatcttcccgacattactattatcactccagtctgggatggtgagggcaaaaacattgtcttctatgttgcctcccgtggtcaccatggtaagcatgaattattctcatttcccttcactatttcactatttgtcgtgtcatgctaatcaaaagcagctgaaattggcggcatcgccccgggatctatgccttcaaacagcaaaatgctgtacgaggaaggtgccatgacaatgggcttcaaggtggtatcagaaggccgctttgatgaggagatagtccggaagttcctatatgatgagcccgcttcgtatcccgattgcagtggcacccggacatacaacgacaacgtttcagatttgaaggctgctattgcagcaaaccacaagggtgcacagctcctggaagctctggtgatcgagaacacattggaagtagtccacttctacatggacgcgatcaagcgcaacgcggaggttgctgtccgtgaactgctcaagtccattggtcgtaagaacaacggcgttcctctccgattctctgacttcatggacgacggcaccgagatcaagctggaaattcgcattgattccgagactgggtctgccgacttcgactttacaggcacgggccgggaaacattcaactgcctcaatgcccctaaagccatcgcccactcagctatcatctatagtctgcgggcgctgatcgatgttgatattcccctcaaccagggctgtcttgccccggtcaatgtgataattccctctggtacacttctcaatccatctgggcatgccgccgtctgcgccggtaatcctattacctcgcagcgtattacagatgtcgttcttggtgcattcaatgcctgtgctgcttcacaaggctgctgcaacatcatctcatttggtatgggtggcgtcgatcccaagaccggcattgaggtacctggatttggcgttggcgagacaatctgcggcggctcaggtgctggaccatcctggaatggcacgtcgggcgtgcatgtccacatgacaaacacacgcatcacagatgcagaggtctacgagctacggtacccggtcatcctccgcaggttttgtatccgagatggctctggcggtgttggtcgcttccgcggtggagatggtgttatccgtgagctggagttccgcatgcctctttcggtgtctatgctaagtgaacggcgcgtttaccgtccgtatgggttggcgggaggtgagtccggacaagcaggcttgaatctttacctcaagaaggagctcgacggaacggagagaatgatcaatattggtggcaagatggagcttatggtccaacctggggagcggattctgattcatacgtgagtggtctacatctttcctccttcatctgaatatatatgctgacaattcttttgatttagacctggaggtggtggctggggtaaggcatccaacgatgaactagtagcgagtgacagcaagagtcatcagaactcttcggctttccagccccgaggaagtgtgcatgcattcagtgtcgctgccgaggcggcaatgtgacattgggatatagatgaggatttttgaatcatgtagccagagatttgcatttttgatttaacattatgcagtgatgtctttcatgaattattgatagtttccttgtgcagatataaaaacttattagcagaccatgactaccgctcgactttagaagatcccaatgattcttttcactgttactgtaagtcttctcatttagcaagggtctgattcttcgtccgtggttcaatctatcgcattggcatctttgatctgacataagagatgcaaatggtcgtactgcttctaaaatgctcaataagaccgaagtcgccaaagtgctggagaatgcacataaataggaaaataacaagtccatcagtactataaggttgaagttacgaagagtcgtttcggttaagggatgctatgagttcgaactaatggaggtaaaggtcacaggagcaatatgactgtcttcaactaaaagtgtgcaagtcaaagaatgtgcctgtagctatatggcccccacgtgaccgtagcccggcgaaccagtgtttaccaaaagttttggctccctcgatgcccgacaaatttattctttcgcgcattcatctcgcagaacctccctttattcaactcttacttccgcacacatattgactccacatttactcaacctcttgactgcatcccatctaccgtcatggagtaccactccgtcccaccggaggaacgtgctagagacgaagatggcaacctcctcccttggggttatgtttacaaagagtatgttcaatgtatcgtgtagctcctcttttaccgaagctaacaaatatgtctcagtgaatctcgcaaccctcgacgaccacccgaagaatcaggaccattcggcaagagaagaaatgctcgatacgataatgctcgctcacgaacacggactggaacaccagcaaagcgcgagaaccccaatgttgctgagtttggtcgactattctcacagcaacaacaggaggccgagaaaacacacggcttgcccaagtcatcatcatcatccagtcttgacaatccacggaagcaaacagagaaggtcgcaaccgaatgcatactctatgggtacaaaaacaaggacaacgagtggaaggtgatcgaaaaatttgagcgcatctcccaaggcacgatctgcgaagactaccctcgcaacgacccgaattcatcgatcaactacacccatctattgagcgggggtgacgtcgtcatccgaaacctgtcggctgatgcaaatcgcaagtcgaagcgctatgccggtggataccactggatcaaggtcacatacgactcgacccagtccgcagaccgcgcgcgcttctactcgccacaggaaattgatggccacctggtcttttgcgagctgtacaatggccacggcccagccgaagacgccccaatccctgcagattctgttgccagcagtcggattcgcaacaaagcaccgcgcaccttgaccacctcgcactcgaccgcctttctctccaaccccagcaaagatcaggaccgcatgacattgcctcgatcctttgccatgaacaacctttccagtgtaccggatatgccagaagacgaaaggcactcggtcgattcttcaacggtcgctggtacctccgacgatacaatgacatccactactgcaacctctgcaactgccactgccacaccctcgttccagcaaagcagtttcaatacaacaacttcttcgtcaacatggacgacaggagcttcgtcaagtaacgatcgcgcctcgatccaccaacgccgagctcccgatcaggccgaacccaccgccaacaacgaattcatgacgcatattccgactgtccgtcgcaccaagctgcgccctatgctcgaggcactccctccacagccgaccatgactgagcgcatcctccgctcaatccccatcctgagctggtttacaggtgacattgtgggcgagggtccggtgctccgcgaggatggcacgttcgattcggaaaaatctggcatttattggaggttctggcatacgttcgattatttcatgagaacggatatgtgcggactgaaggaggatagttgaggcgacatgaaggccattgagcactatggaaatggaataccttttcgtcttttgttattcactacatcacggatctttcgccccaattgcgaagtcttgcgcgcgatgaacctaaaaaccgaatcgctacgcagcttgaagggccagtcctcaacaatactgcgcgcgtcgcgcaaggcatgggggtcaatggatttgcggtaaaatggataatgtgtacgatagctgcgtcagatgcagacataatgaactgtcctgtcgagggaccgcgcaaaattgatatcccgtagaacagtaacaagtacaattcctcaaacttctgcttcaacaacttttcgggtggttaatcctcgagctgtcagaagtaacatccccctttccgtcgccgagtgcatcaacaacgctggcacgttataaacccatgcatcaaccctgcccggaggaagagaccaaacagccagaagaaaaaaagagaaaaagaatcaacaaaaaacaactctcaaaccagagcttaaatttcattgatcatagacgaaagtttttaaagactcgatttagttcgcatctaggcgtgtttattccttagtctcgaagttctcgccctcgacaaggtcggggatgtcatcctcctcatcgtcctccttcttatcaccctgctgcttctgcatgttctggtagctctcggcgagcttacgcagggaagcgagggagtcggggccgagctggttcaggatgttggggacgagctcagtgagctccttctcctcgccgttgccgtacagggcgaaggtgttggaagggacggcaccgtggactattgcgatgaagtgattagactttttttgttcttcttctttccttcttctctttgttttgaaaaggtcaaggtcgggtttcggggtggtttctactcaccacgggggttggcgaagtggatgacgttgccgtcctccttgaacatgttgacctcctcgataccctggatgggctggacgttcagcttcttgagggcggcctggagcttcttgtcatcggcgccggagttgcggacgaccttcttgaccttgcggcggggagtacccttgccactgtaagattgttagtccgagttcgacattggacggttgaaaaatgtggtatcggtgtgggtaagtgggtgaatgtgtggtggggggatgtgaattaggaggggtccgaaaagatcgaaggaatgcgaggatgacagggccgagagtcagactggattttctgaggcatgcgatatgcgatatctatgttcggttcgaaatttggatatagtgcgtcgcatagattcgagaatcaagaatccgtagtctgactatcggcagtgtcgaatccgagtattgcaattcgaaaattcgtttcattcgtagggaatcgagaggttgggataaaaacaatgctggatagaatatacataccctgtcaagaagaatcatgttagctatcaaatttgcacagttcaatgtccaccaagacatgtaaattgcagttcttgagacatgaccaagctccagggcgaccgattccacagaatcgcaactccacgtcattgcccagttcatatctcaagctgagatatgatttagaatagagagaaacataccgatgcgaacgctcgcctgcattctagccaactttgcctgatccatgatgaagtcgggaggggtgatcgcctggcgcggaattagctggtgattcggggaaaatccaagatttagagagaattgcagagtcaattattctgacaatcaatctctattgcataccgttaaaaaggagttgagggggagatggtaggaggaaacgtgaagtggaagtgggtggaatgatgatgcatccccaagagttttgtgtggggagttagccagaatattcgctaatgcgccgatttgggttaacgggctgtttgtgtttcaacgtctacacttctacatgttttacaaatcgactcgatcgcgataacactctatttgttgttcttcctggtgattttggctattcgcaagttccagggttgttggattgtgggatatttggtgctcggctaaaccctaatcgggctgtcttcggagtatatgacgaacatgggacttatcctgacgctttgcacccattttcattccactatacgctgttggtcatgttctcgtggatccccggcttgcatctcgcttggatgatcttgtatgtgccctacgtgttcgagcaaggtctcattgtctgggacgagcatgttgcgcgcgtaacctgcgaggtggactccagcgtctgggtgtggcaggaggtcttccggggagggcttgcggagcgtccattggccgggcacttatctaggggctaggacagcatgaccggcatcgaaatccatgcttccggctacgtaaaggcgggagaatggcagcgcgccttgcagaacaatgtgaattgtaaaaagcagagcaaagctaagtcgcagataatatttcagtcatattatacatccatatatacacccatatatatatacctcgatggttccattcattgcttcgaaacctgagtctcggtccaatcccagagcttgtgagccaattgcgcgttctgcgcaggcgcagtgccaccactgcgatacccaacgggagtatagtaagctccattgatgagatcctcccttggcgtgccagccgcccaaagagaattcagggctccactagcgacacttcggaagaacgtggaaccaacagctgtcagagtatacttcatcgtcgagttaaggttcttcgcatatctatagagcccgctgtcaaccgctccgggatgcacagcaatagacaagatatcaggatgccggcgggctagctcggatgcaaagaggatattagctaatttggaagcgccgtaacgcgtccaggtactggcagctaataagccaggggtagatgtaatttcctcaaaggtggaagggctaacagcgagagccgccgaagcgacagtcacgacccggacatcggggacctcacccttggcacgctggagatcagcggtcttctgcagagtaggcagaagcagttttgtgagcagaaagtgaccgatatggtttgtgccgagctggacctcgaagccctcctccgtcgtagtaggcgggttgcccatcgtgcccgcatttaggattaggatatccaggcgatcgttatcggtctggaacttgtctgcggcggtgtggatagatttgaaggaggacagatcgagtgcgaggaagcggatatcggcgggggaggagagctggctttgtagcgattcgattgcttcgcgcgctttgctctcggtgcgggcggccatgtagatgcgtgacgggcgatgcttggcgagttgaaggatggtctctttgcctaggccggtattgcctagatcaatcaatcgcggtgtcagtcttctagaagctgtagatagatagaaagaagacatatattgtacctcctgttacaagcacgaccttgccgtccaggctgcgaatgtcgcgctctggctggaacgatgccccgaaatagccgaaagtggcttcattcaaggtcgggccaaagctcgacagtgcctccagaggatgacgcaagctgtaggtcgcaaagccacgagtggctataatatcacggagatccatagttccagatccaattggagaatgtgaggggttgtagaagttggaagcaggttagctcaggggggatttaaagtaggaaaagtcaatcatgactaggggccaaggaataacgccgtccattcttcgcatgtgaagtttttcagatcttgatcttatcaagatttccttcctggcccgtaaagaaacaatacggagtggacttgcatttatccctttgtggatctttgtgcatctcacatcagaccatgtcgaattcatccgccaagctagttagttaaaccccgctgcaggttgatcccccttgtatctctcgagactctctcccggccacttgtcctgtagactttctactccttgttttcttttccttgacgtaacacaaaaattccgaagtgtctgactatagtcttttataaagcaatctacgtgacatcaagcgaaatccaaccacaatgcgatttctttgcttgcacggtgccggcacaaatggcgaagtaagcatttcagtagctttaacatagaagatactgaccagctacagatctttgaaatccaaacaggaggcatccgccaattactacagaaaagtggtcaccgcttccaattcatgaacggaaagataaacgcgaaagtccaagagggtgagctctattttctacacacgcctaagccatttactaaccccaactccaacccagaactcgaaggcatagtggatggccccttctataaccactacaccagaggtacctcaccaggctccaccgtccttgaagccttcgaccacaccaagcaattcatcgcagaagaaggcccattcgatgcggtgataggcttttcacaaggcgcggcactagcagctgcacttttaatccaccagagcaagacgtacccagatgagccgccgctattccgtgcagcggtgtttatttgcagtgcgatgccatgggagagttccggactggagcagatttcgccgcagccagatatctatccgattaccattccgacggcgaatatcgttggtaaagccgatgcgctgttccccgagggagtcaagttatttgagctttgtgagcccactaaggcggctttctatgatcatggttctaagcatatggttccgtttgatatgaagaatacggaggagatggttagagttatcgaggagactgtcgcgaaggctatcaggggttagctgagatgatgggaacttgtggatataggcaactattgactttctacaattccacctatgtttccaacctcgtaaagtttatagattgttattcttctctgccttgtctaaactactacagaatttagacaatttcaagaactaatcatgccaagcgcctaaagcaccttccctgtaagattggtgataattcgactttgatcaatggtaatgtgcgaagtggataaataccgggaaatgatatccaaaagtgactcttcaaatgagacgctaggttatgtactatcttgtgcatatcgcatatactccgtaatattataaggtatgatcttggagtgagcaaagttggaaatgattatttccgacctgtggttagttatgcgatgctgcatgtgtcatgactctggccctgagattggttgtctctcggtggaccatcgttggccgaacagcgccttaagtagggcttttggtaagtttgtgcaggttgaaagtggacctcccagcaaagcccgggaactagtaagaatgggtttactaaaattgcataactaactagttatttaactagctatctaaaaagtctgtctcggcggagtcagcggctaataagaaaaacagttctcactaaccaagggcgaagtgggtgctattacttcatttgatagccttgcagtggatgatgccctactggccttcgaggacactctttcgattataggaaaaaggtggggttgatgcatgagcctgaccttccaagagatatgctagtcaagctggccgacgctatcctccatagcgagttggctacgcgaaaatcgcttcaagctgtggttgttggattgggctgttctgatgaccatgtctgtctgtatcagcagctcacactgatctttggcttcctttttagtctttcacaatttgtttctcgggcaccaaggtcatcattattgataggcacgttttttaaagccttcgagggattgataaatcattattatcttttgcgttcgtgagaaagaagcacatcgtttcatgttcgatagatgcattgcattgactgatcgagacaaaggcctcagatggggtatatgaaatatagtgcaagagattatacaagtttccacagcatactaataataatggtagcatccatgggtgagattgtcatcagttctcattgtgggctttagtacggagtacatcgaaataaatatccgatcaatccgccttgtatacttcgtacttttccatatcggagattgcaatagatttgttttctgtttgtcgcaacttgaggcttgtttcatagattaatcatttacttccttgaaaggtaccccgtacatgtagcgccaagtcaacgagacctcggcggaaaatgttgccaaatgccagaaatgccagttgctactaataatagcacgtgggcgggttcctcgagcaacacacttctcacacttgtatgaacaggcagccgtataatccgtataataagaaaaaagctttggagacaaactatttctgcaccgaggaatatctacggaatacaaagtcatgtgttttacacatgtacttgtatgaagtataaaatacatcgactatcatgcttatagtaaactccattgtgcctgtttgtgatagataattttcttttgatcatcccaccacgatctaggctgattcaacgccactggcttcgcagccaataaatgccaatggtcctagacttgaaaatatttaacattcaatcccaaagaccaaaaccgggagcctgctttgtactgagaacgccacaacacgtgactctgggcaaagccgcctcagcggcaactcacaacttgtcagcttcactccagacaacaccgttaatctcttcccctctgtcacctgccgtcgcgctgtatcccaatctttatcagcatacaatagctattccccatacacaccgtctgcgttgattttagtcccccagactccccctttactgcgcctccccatcaaaacagcgcaacccctagtgctcctgcgagttcgtctagacactcccaatatccggcaatcaaaaatctgagcttctctcaaattcattcacgactctcataatggctgcctccgaacaaccttacgacccctatatcccatctggctccgctggagcccccgctgccaccgggcagaatggcaaccagcgaaccgccgctttgcaagcagtaagtcaatcctcgacaatctcttgactcctagcgacctcagccagtgagcaaacagacaaatatggtctggtggatagcgaatgcttgctttcttgttgagctatcaaaatgcgaaggctggggcggttgattttcgcaatggggctgacatggtatcatctatagcaaatcgatgatactgttggtgtgatgcgcgaaaacatcaacaaggtttcccaacgtggtgagaacttggattctctccaggacaagaccgacaacctcgccgtctcggcccagggcttccgccgaggtgccaatcgcgttcgcaaagacatgtggtggaaggacatgaagatgcgcgtgtgtctagtcatctgtgtgatcgttctcctgattgtcattattgtgccgtccggtaagcgctccttggcattcccctacctgactctccagcgcgacactaacaccgtccacagtggttgccactaagcactaagcactaagcacttcaactgcgcgcgacttacgacttatctttggacatgggatcttgaattttactgggcttactgttgctgggcccgtgtggccttttgttttcttcacagccgctaatacctcctgctgtttttttctgggcgtgttttcgatgaccaaatcctctttgacttttccatgcaacgaagcgagatcatccgattttgggttgtgtcacctgcgacccggtcgacgggtgaagatgtaaatgatacttccatgacgccgtgttcaagtatgcttaccacacaaccattcgggtgctttctgactgcaatgaatctcccttatcgtgttttgaagcgaatttcgattgccgagtcttgctgtacctgaatagcatcatagctatacaatgtagaacgtcaatgtagatccacactgagcaaagacaacgtccagccttgtgcatacataccggttcatgagtgtgcacaagtgatgaaggaagaagggcgaccgagtccggcagagattggggtctctccgcttttggctagtatttacattccctgtttcgtagacaaggcggttgaccattacagggctgagggctagcagacttggaagtccacgtggcccaagacccgtctgacccgtgaagttccaattcgccaatgagaatatccttccaggaacccgttatgtatgctttacagagtatgtacatacatatgctcgagctctacttggcattaatctaacatgatctaaatgtttccaccgtggatctcctgctatacgagtgcagcagcgcaatcctggcccctcctgacgaatccttcgggaattcatcaaccgacagtaagaaaaaatcagataataatggagactcttggcacgagaacgagtgtccaccgattcctcagttagaccacttagagaagccctcgtatatatgtcggcaggaagcgcagagtgctaggtccagccagagtggagggaagtggatagcggtgacctaacggaacgagtgagaggcagggacaggatcagataactgagactaaacccaaggaggatgacgtttcacgatctccgagcagaggaagtgggctttttcggaggtcatactctctcttgaggaagtctaaggagattccaagttccagggttgatatccgagcccgtgaagaaactttttcttttatggagtttatttcgcccggttgcggcgtcacacaaatgttaatattgtacagagaaataaaagaagaccagggaaaataatcctctaggagttcttgagacaaaagaaataaaaatcaacaattcccatgtatacgaaacgtaaaagaatcccaattgcaaacaaagatggggagataaattgctcgctagagagggggtccaccgccttctccccgtcattgggtcaaagttatcgctccgaggcccggccgatgatctgaaaaatatctctcttgactcaactttctcacttaccaccttccttctacctacttatacatatttggggcctctcccacccagggccgaccgtgagaccattgaggctgccgcatgtgcgttgccaagatgatgtcccttcgctccgctgtgcggagagcttcgtgcaagcccctccgttctctctccgcaccgactgctcctctgcgagtctcagtaaagactgccacatccctgcgccagactcgcaattactctcgctcgacggatcctcacctgacctctacccgcagcaccgtcgtgcaactgttgagcaacattggctctaagcgcgaggtccagcagtacctgtcacacttcacctccgtgtcctctcagcagttcgccgtgatcaaggttggcggcgctattattactgagcacctccagaccctgtcatccgcgcttgcgttccttaaccatgtcggtctgtacccgatcgtcgtccacggtgccggcccccagcttaaccgcatgctggaggcggccggcgtggagcctcatttcgaggatggaatccgagtgactgacggcaagaccctggccctcgcccgcaagctcttcctggaggagaacatgaagctggttgaggagctcgagcgcatcggtatccgtgcccgtcccattaccgcgggcgttttttcggccgattacctcgacaagcctaagtacaatttggtcggtaagatcaacggtgttgacaaggcgcccattgagtcagccattgccgctggatgtctgcccatcctgacctccatggccgagacccccgacggtcaggtgctcaatgtcaatgctgatgtggctgccggcgaacttgcccgtgccttgcagcccctcaagatcgtctacctggctgagaagggcggtttgttcaacggtgataccggtgagaagatctccgctatcaaccttgacgaggagtacgaccacctgatgagtcagtggtgggtgcgccacggcactcgcctgaagatcaaggagatgaaggatctccttagcgatctacctcgctcatctagcgtcgctattatccaccctgccgatctccagaaggaactcttcactgactccggcgctggtaccctgatccgccgcggtaacaaggtccatgtgaagacctctctggccgactttggagatatgaaggctctaaaggaggtgctgattcgtgaccgtgagggcctcgatgcccgggccgttgttgaccgctacgtcgagggcatgaaggagaaagacttcaagatctactacgacgagcctatggaagctttggccgttgtgctgcccccgcaacccaactctcagatggctcacttggccactttcaccatcaccaagtctggttggttgactaacgttgcggacaacgtcttcgccagcatcaagaaagatttccccaagctggcatggactgtcaaggaggacgacgagaacctgacctggttcttcgataaggccgatggcagcttgagccatgatggccaggtcctgttctggtacggcgccgcgaacggcgaggaagttaagcagctagttcaggagttcaacgcgcacggtcgccaaatgttcggtgacattaaccttgaggcgcgccttcaccgcgctgctgaggctgccgccaacatcggcaagggcttcggcgctagcggtgcttctcttgagcagaaacgtgcgttctcaaccaccaccaacgccttgcgcatgacccgtgctaagcgtcccgccgttgccgtgaactctttccgcacttatgccactaccaaccccaaccctcctcttggagagaagaacatttccaacacccagcccgccaaggttgctctcattggtgcccgtggttacactggccaggccctgatcaacttgctcaatgctcaccctaacatggatcttcgtcatgtctcgtcacgcgagctggctggtaagaagctccagggctacgagaaacgcgagatcatctacgagaatctcagccccgaagatgtccgcaagatgtctgccaacggtgaaattgactgctgggtgatggctctgcccaatggtatttgcaagccttttgtcgatgccgttgacgaaggttccaagacgggcaacgtcattattgacctcagcgctgattaccgcttcgatcctaactggacgtacggtcttcccgagctgattgagcggtctaagattgcccgggccactcgcattgccaaccctggatgctacgccaccgctgctcagcttggaattgctcctcttgttccgttccttggcggccagcccaccaccttcggtgtctctggatactccggggcgggtaccaagcctagccccaagaacgacgtgcagttccttaccaacaacctcatcccctacagtctgactgaccacatccacgagcgtgagatcagttcacagctgggcaccagcattgcgttcattcctcacgtcgcggtgtggttccagggtatctccgtaagtgcctactgatagctcattgattctcaccattgctgacatataatatcaagcactctatcagcattcctctgaagcagaagatgacctcccgcgatatccgcaacctctaccaggatcgctacgctggtgagaagctcgtcaagatcgtgggcgaagctcctcttgtcaaagatattgccggccgccacggtgttgagatcggtggatttgccgtccactccagcggcgagcgcgtcgttgtctgcgctacgattgacaacctactgaagggtgccgctacccagtgcttgcgtaagttgctgaacccatccacttcatcagccatgatgctaacaaccctcatagaaaacatgaacttggctctaggctactccgagtacgagggtatccctcttgactaagctctcactcgaagccagtgacgagtagttatcagagtgtgtttgtgtgttgttcttgcatgtcttttgtctcataccccccgtgaatttatacatcgctctgggttggagatttctgggtgcttcctatctatttacagatcttccatagttgattttgtctacgcttatacttgtgtcaaaagagtgcggtttctgttggtctcagtccattttgctccctagaattctgctgcctcctttcgggttatcggtttttgtcccttgtgcttaactaacatatgggcccccaaaagagcctcgagaaaagtaaaatttctttcttctaatgttgtggttttgcccccaggagtgttctttatcccaggaccatatacgactcgatttgattcattgaacgattggaaacggggaagcagttcaatcgatgtaattagaaaacaatatatgttaatgggaacttttgacttgtactcatcagtgctatagttgtaagcgtggactttatgttgggatacataacgcatctgttcacgcctcaagggtcttgtgctcaagctgggacgcacactctctcttgatcaaccttccactttctccctcttccttcaagttctatcctcattttctgtactctttcatccgtgcttatcgagggtactttcatcgtacctttcactgtctttcgtccaaaactactccagaactgactgcacattactctggcccatgggcaaactcgaggccaccaacctgcggctgtgattcctcttcaacttcccctcccatcaaaaattatttcgcttgaaccgttaacctatccataacccgcatctcagaatccgagccgtgtggagaatcgagggcctgggtttcactcgagttcacttgagccacaaccatgttctacagccatgaaagtaagtcgaagaatccttgtggacgatctttatcgaaataaacactcacctgtttgtcgcactctagtcctcacctcgccagagcatggtgtcgcgacaatatggtaagaaaactcagggcttccacatatccacatccaggactaacaataccctcatcacaggctagtcgcaactctgggatcccggtcgatcgctagaagactgaacagaaaagccatccaggacgttgatgtccccaatgcatgccgagtaatcatcaatccagacgcacctatggctcttcgactgcaggggagcttgctgtaagatctgccgataagtgatgtctccagaggtatgctgacaacgtgcctgtgttaggtacggcgtctctcgagtgtacaatcaacagtgtgggtacacgctgctcgacacacaggcgatgcacgacaaaatggtttccaagttgaagatcatcgcgggcagtgggcttgatcccgccgccggacagaccaggtgattcccactgattcaattttcaagacattggccgaacactaacttcattccagggccagcaatctgatactaccttacgatccgtctttcctacccgagacagctcttccaggtcttgaaattgacttgtcctacttcactgtctccacggaagacagctcaagccaactgagtggtctctggaccaagtcgcccaataatagcctgtctggcacttcgcaactttcaagcctgcaccttgagctcccatcagatgatatcctgggagagggtactatcctagggattgatgagattaatggctctgcgcagaaacaagataccttcggtaacatggcagggttagggctgggaaatgaagagggcgttctccttcaacctgacttcgaatttgacgaggatggtaatatcatcgagctcggtgctagagagcagtctcctcgtggaaggaagtccaccgttcgctcaagggaaagtgaagaaccgatggaggaccaacaacaacggctctgggaagactcggtgagtaccaaacatccatgccgtaaccacaaatatgtctactgactctgttatagatgcagattgacgacaaggaggctagagtggccgagactaacgacatgatggagctcgacacgcagaccgcggttccaacaattctccagacaaatgaaggccaggatggggctgaagaaacaattgagatccaaacagcgaggacccgccgcgtcaggcgcccgaaggaaatcatctccgacgacagcacggcacttcgaaatatgacgctggcccaatggaacaatgaatacgttgcgaacatgatccaagcactaaagcaaaagcagcaaaacaagactccaaccatttcgaagaagaacgctgctttctgggttttcggtcaggggatcggctcggttggagtcggactgggaatggaccatgaactgcacccgctcaacttctactcaggcgaggatctgttcgaagccgttggtggataccctcagcgaaaacgaggaaagcgcagcgcagatgacgatgaaatatcagagggacgtcgagtacgcgcgagagacgaacaagcagagcatctcagccgtgagaatatcgaccgcctcaacatggaagttgaactcggccgtgatgccccttcgagtctatttgacgaccactcgtcccagatgccatggaacatcaccgcttctattcaaagctctcggcaaagacatcgattcggcagtgtcagcgagctgtcttctcaaggacgtaagcctcgaagccgtctcaccagtgccagtccgcttgccgggcgcagctatctcgtgggacaagaccaacttgatctggagctcctgggtgatttcggagacgacctagaccttacccggtatcttgaaggggagctcgcgacagaccgcgagaatatcacctcactctcccccagtaaacgttctgctgtcgaacgggctaagtcaactctcgatcgggaaagcttgaatttcatagagtttatgaagaccaagatgggtactgctaacgatggcaaagcaggaaatgcacaaagcccgaacagcaacgcgtctagtccggtcgcaaccagactcggcccgaccacattcgcgagtcttcttcctcctgggagtacaacgcgagctgtcgcgactcaggctttgatgaatgttctcacgctcgctacaaagggtgtgttacatgtccaccaagacgggtacatcgacgacagtaccgagtgggcagtccgctatcgctatggcgagattttcctacgactggagtgagcgtgaaacgtgcatactaggttttgcgatgcgaccacgaatgacgtcgaggaactcgtgtgcgaatggttcctatttcaatgagaatgaagagaaacggccatgacgattgatctatgaacgaacctattgacgcgatctgtgctggcgtattacatcaccacggaatgcgcagatggaataacatttttacagtgcgatgtgcgtaagagcgaaggcaataactgggtatgcgaggatatttattgcccatcacatttatactccccaatcttaccaggaacctgtatgttgtaactgaatatgtagttgacagtattgcgtatgggatacgcccacagattcagtaacagtaataatacccgatgttttgatcgcgaaccctggaaatggaagtatacgaaagtacgaaagtacgcaagtatacggggacgtatacgaagtataaagatcaataatcctcggctttgcttctgattgtatgagattcacatagaatttgtcttcaccaaatccaatcataataggctctgatccgagtgtgcctcgtttgccctgaattctccgactcggcggtaggcttacatcttacacttctgacatggaggtttagaatagttcattgcagattagctgtcgaatagggattattcaaggaattgctttttattaggcatctattcataagtatatactagtgttatttctagaatatcccgaccggtctcatccagccgatgtaagccggtaagtgatagataaagtgaatggaaagaggctaataagtgaaacatgcactcaatacacattctaatagacttgatagagtaattaatagacagtataactacaaatgtaccataacgacatagatgtataggtaatatacctccagtacaagtaccggtcgcacgtaccgtaagcagtgctccaaattacgcagggtgcgtaacccgcgtattctcccgtcttcgtctttccattttcttttcttctctctccctgacccctccaactttacaactcatacgcgcctttacccattcaaagttattctcgcgaccttctttgcttactatcgtggatactcttcctctcattactcccctaatcatgggtcgtaccgtcgaccaggaggtacacgcggcgtttgtcgagtttcgcgccaaggaagatgacaaggtgcgtgactgtgtatttcgtaatatttcacccacgacctgtccgtcactaacatacggaaacccgttttttagtgtctctccgttcagtgtatatactgccaacaaattcgagcaaagaacacttcgcgacagaaacaacatctccttgaatgtcccggtctgcgcggtcaccccaacgcgcctcagccttcccagcccgcccaggccgcccctaacggaatcggtccccccaatggctaccccggcactcccaatggcccaaccgcaacctcgacaggtccaactggtcctggtactatcccaactcccaatggcaccatcatgaccaatggtgtcaaccctcatgcgactccgttgcagaccccgttgggggccctccagaaccgcgccgcaatggcgaccccggttgcgcctaccggagctccgtctgcaccgccaagcgccgtgccctcgcgcccgactcccaagccaaagaccaagacagcaagctcgagcttgcccgcgcccccactagacgatgtgcacgcagctttcgttgaattccgcgcaaaggaagaagacaaggtatgacgaaggaactgggcgaccatagaccttggaacatacaagctaacagtgcggaatagtgcctgtccgttcaatgcatttactgccagcaagttcgcgcgaagaacactagtcgccagcgccagcatctgctcgaatgccctacctatctcagcgtgatgaaggactcgatccccgccaacaatctgctccacacattccccgagggcgatgtcgcccgatcacttcagattcccgcgccatcgctggagctggatttccgcatgagcatcaaaatgaaccccaaggtgtctgttggtcccagcgtgtggggccaacgagagtgggtttcgttcatcggcggccaatgggccggtcgatggggtaagggtgttgttctggtaagactgaatcccaacctccaatcattacttgtccggtgtctaaccttttaaaaacagcccggtggtcaagatacacagattgtgaccaaggattccactaccaaccttcgtgcgagttatatcctccagactgtcgatgagccacctgcatttatcatcgtgcgcacagaaggatggttgacaggcgccaaggatgttctcgagaaggtcatcgatgccaacatggcggatggggtcaatcccggcagctataagtaccgggtcaatttgtccatggagacgggcgatgaacgatacacattcttgaacactttgatgtggatcggcagcggttgccgcaggggtcaggaaggtaggcttcttcaatgctttcttttgcgattgtcccatactaactagtcatgcagtcatcttcgactcgttccgtgtcaactaggtcaatgcccttgtcaaccaatgatgtcctttccgttattcagcgatttcgtctttttttcaacttcaactttgtgatgggaaaacggtgtttctactttgccatttcttgacacacggcgcaacgtttctatgattcgatccttctcaccacgactttcttcttccgactctctttgtttgatttcgaaccaagggtatatccgccaccctggtttgcacatgccccgcaattaagctgatcttgagctctgccttgtctttgctcttcattccatgtgttttttgcggttcttcttctggtgtaattcttttatggctatctctatcaacatagtcagccttgtaaggtattgctagcttttttttgatctcggcttttcatgtcccatctccaacatccagatttcatatgcaatattccatgtagtcattctcaataggattgaatgttgttccggatctgattgatctctgtttcatgataatttcatgataccttacaaaaaggcaggtaactctagccctggacatcgtacgcttacatgaatggtgatatcactgttactatgcaatctctcaaagcaaagattcgactttagggagatgaagatatctgaatttggaatgtatcttgtttttggaataatatagaacgaaatatataacccgcttgtcatgtaccgcaagaccgtactcaaaccacggtatatacctgtacgtaccaggaacataacgaataccttttcagagaactttgctgtatatcgtattattatttagaatcgagcaattaatttgattttgtaattcatggaagcgtatataaatacaaggataggtattatacactatatcaatctctagcatactcatctccagtgaacccgaactggttgaaaaccaaatcatctgcccacgtaatagcaaacggattcctgaccaggtcagacagcggacttcctagcctcggtgaaagcgatatctgaattgcattgcgctcattggaaagcccttgagaaagactcatgaatttgagggagagtgggaatcgcacaaggggtgactagttagctgattccagtcagcggtagcttttatgggctgaaatcgccgatgtcggatgtcgcaaagagaggtatgccgtcgctgggtatagccgaatcgctcggatgtgcatatagagaaggaaacatatgcctattggtattgggtactttagttcctaatgttgacctcggtttgcttcacatagatccaagcgctaaaagttcctagcgtgccggtagctctctgttgagcgggtcggccgggaccggattggaggaggcataggattctggtcatggctgattgatcttatacgaaaaagatgagcttgttagtattattgaatattgttttcggggtaactctcgacacatggtatttaacaacgacaaaatgaaaaagagaaaataatatcatggacaacctagagtttccatgccaatgacctatcctactactagacacacgcctccccaatcccgagccctttcatctacggtttcaagcctgggttcagtgcctggaaatgcagcacaagactccggtcttcactaggaagtacagtgccccgaagaatcggaagattgagagaccagaagtggccaacagaataatcttgaaataccatgccgtgcgagttgtagacgtcgactatgtcagttagcgggtgtaaacagcagacgaaggaactcgagcttcacttaccgttagacaaagcctgtcgatgctgaggttgttaatacacagcgccagaagaccattactgaatgtccatagcaacaccagattcgttcggaatgctttgtatgaatcgtcgagggccaccccttcgttctcagttggttcttgccagggagtcaaggcccgcttcacagttgacgcgaattgttcatcaatgtcgacttgaggcttgtcaagttcctcgacaaaaggcgtttcatcatcctttttggtttgcgctgagggcagtttttcgggtgcatctgatccctttgtcccccatgaaacatcatgccaattgcaaaatgcatagaccatcagaacattgatcgaagaaggcattccaaggaaatatgcccaggaggaagtgagcatatgccaggggtcggcgtagagtatacttgcaatgaagtaaatcccgtatgttgataccaaggcaatcaaaacaagcccacccgttgagttgaaaaagcccgatatgagtgccgaaaacccatggctgaaatcaaaattgagattctcgggagtcattgcctgcgcaacgagatagaacgacaaaatgaggagatagagctggaccacagagaagtagacaaaggagagcgtgtacagaaactttgatctgtgattggatattagcggagcgaaagatagtaccctatccccaggccctaatacttacccctttggtcgatttccgagagctagaatgaattgaagcataagaaatgtcagataaccgatcttcaacagattattgacaatcggggtagcatcattcccaaaaggccaccctttgaatttgttggtcgcacttggtgtccccacaatatccaaaatgacggaactagtgagccagtaggatgctatactatgttagtgatctggtgtaggattgatttgaaccccaaagagtaccgtcaacttaccgagtgaaagccatgtcatgactaactggcagatattgtaaatcaattggatatgaagcagtagcaaccgaatgataccatgcccactcttatatatccgattgaaatgcatgactgaatataacgatgctgcaaaagagccattcagccatcgtcgccgttgacttaggaactctgctggtcgttctgggacgtctgtttcccctttcgatgctttcacgtatgtaagtagccactggttgccagccttagcaactaattcgaagcaaaggatacgatcctctgcaagaaacatattcttcttaaagatattcattccgtcgatccctttcttaccgagcttctgagctagtgtgtgatccccatgaaaatactgctcaagaggcctgcccataatagcgcgataccgataggcagagaaagcccccggaagtacgctgacgtagccaaaactgctctctaagggcttgtccaggatattggagattttgtattcaaaattttgagctgcaaccaagggattgaggagcttcttccatcggtggccaagaagcgcgtgaatttcaccgcaggccccaccaatatttttatcgttgtagaaagcctgccacagggctagcaaagacttaggcccgggttttgtgcccgcgtcaatcaagatgcatatctccggattcaaaatgcgcccaaatgcgttgaatagccaccgatgtgagttgatcttcttcgcattctttttcttaaggcaaaacatcatttgtaccgggggaagattcatagggtcgtctttgtatggacgcacaagctcttgcttcggcgtaaccgacaactgtgtggtatattcaaactaagaaccattagcatctaaacatttcccttactgaaatccacaagggttggaaggcggggaaacaaacaacatgagcgatcgtttctcttccgtccacatcttgcttcatcacgccatcttgaaaaacgccaatagtcgccaggacgtcaagtgtgtttttatcgcagggatccatgccatcgaagacaagacagacgacaatcttctgccatgcgggaccaccccgatcccaaaattctgtctttttcaatttcacgatgtctcggacattttgcattaccccatgcagggttcgggcggtcaggactttatcttcgttgtagtatgtgacggcaatgagaagttcagtgtgccgattatacatcgaagggcggagattgtaaccattgcgtagcgtaaattcatcaggatcacacgtcgcggcagtgtctaaagaaaatagaataagtcagcttatcatgatatgttcgagtcaactggaacattggtgggaatactcacatctcatttgtgtgaattcttcagaaagttccccctccgcatctcgatactctggctggatagcattgcgtataggactcggtaccggatagttgatactcaagaccgagccttgtgtcaacttgatccgccgtgttggatatcgacggatgctacttcccttgtgtcgtcccgactccttggaagaggacacagcggacccctggtgagaaaggttgtgtaatctgatctgatcaggaaggtcgagtgattccatcgaccctggcctagggctttgaacctcagcagatgaagagttatacggtcgacgagtgccttcgctccaagagattgggtctgtagagggactgagagacagggcagaagaatgggccggatgaagtagggagagggcgtgctcatttgggactctagtgttctggcaaggatgggaaatgtcagttcggcttgccgcatgttcggagatcaagcaatttccacttcatatacacttacctggggcgaataaccatcacttaggccgtcactctcattagtttgccgtacatagtgcgatgaataaggccgatcaaaataattcatcatgtaccaatatgaattcagtactgggggagtgtgtaagctgaaagttcgagatgcaatccctgaaattttttgatgccaagccggttcgaattgattaaggtatgacaggctgtagaaaaatgccgaggaatttgcaggggatatcaatcaagctgaaaataattgaagagccttcccctttccttcccaacatggaagaataacgagctagggcactctaccttggcccaagagaaattaagtataagaggctaatttaagcccgggaccccacatctctgctcgatgagttggccaataatatggcaggtcctcttttttagcgtgaggcttaaacacccttattatcctcaaccagccaatggacaaacccatattataggcactttagttacctgagtacatcatcttggtaaaatttcacttaattaaccgactagatattactcggattttgtgaaatcccacgaggcacaaaattccgattgcgccgagatctgggatcactttgaagtaagacacgcagtgaagtttcatgtattttaagagtgtttttaaaagggttagacccttctaaggataagtacgagagctggttccaaaataacacttcccctcccaaattttctctatgttgttcaaaatgagctcacacttggcctctcccgatcagcgatggaatcagagttaagactggacgagacacagccagacaaagtatcgggcgaagtaattgcacaccaggttaccggctgacttgccaacacattgtcctaaacttgtcggggacagcaacgtcgcggctgactcaaagcaaacgcacggaaactcataacgtatgtattgattgttgtcattaacacgtaaacttcagcttttccaaaagtctcaccgcctctttccttcagactatttgatgtatactagttcaaacagctctggtgtaactataggaagcggggataatattctccgattctctatcacagtcagcattaatcaaaatcgaaactatgtgactgaatattttcaatatttctcagattctacaggtgattgaatgtgttctcaaatggctgtctgaggctgattaaaaagggttgtattagccatgatcaagataaataagaagggctaaaatttctgcattcaccttggatcctctaacgagaattgcgagccttattttaagctcataacttctaacattgcagacttcgaagctcgaagtctcagggggcagccagtcattggaccatatggcatcccccaaactgaccgttgagtccgaaggagcatctttgagacctatcttagacgggaacgtttatctcttgatccaatgatctagggaaactcctatcaagttaagtctcatatcatcggaagaagatatgagccgtacttagggtacatgacgcatccgcagtctcccgtcgagtccctgtttgatctgcagggaaagcccattatctgagttgtgtttcccgagtttgaataatccatgtcatatataccacttacccactttttgatgcgttccaacagcagagcacaggccttaacaataaccgctgagaattacgtagtgggaaggggaaatgtaaagtacgatagggacgagcaggtagagtgtttatccatgttattctttgctaacctacgatgtttgggttcgtactgagaagcccgagtatcctacttcgtacctcgcacggcattcgaggtgttatctatccccctgcagaaatcctcgctctttcattgttttgtctcacaatatagagctttcagtgaagaaaaagcaagtccaaactatttatagacctaagtacccgacccttgtggactaaattaaaagattactcagtcaaattgtccgcgctatccaaatggtacggatggtagggtaatatcatagccacaaacgcagtcgtttagagatgctgtctcacaaagtcagaagaatagttctggcaagagtatcacaccttcgcaggatcacgaattcagtaacttgaaaaaagcaaatctgaactcagccatgagtagtacaacttgggccgattttcaataaggatcacacaatctaggttgatagccagcccctttctagtggctgtttgttagtccactggtttcattacttgcagatagacaagagaattctcaagacgccgatgaatacgaccctaaagaaatataaatattatcaccctgctgaccttgagttagactcctctagtaccatttcacatttgacattcccataatcgagacatagttcgtccaatttcaatatgcgtctcaccttcattgtatttatggccattatcggcgctgctttggctgcagacaaggcccctcctacggtaagttctaacaaatgaacgtcagataccattaaagcctctaaacattctttagattcagaacggatccccttgcaaggccgatggcagcgcaggaatctgtgccagtggcttctgtttggtaggtttcttgccttgctgaaaatgttgtgacatcaaatattaatatgtcatacagcaacttgctcacgacaatgagggagtatgcaagtagactacggatctcactattggttttaattgattgacgatgcggcatttccgctcaaaggaaagccttcaggggatacagtatggactactcatatgggtgggttgcttaagtagtcgatgtttttagctgaatatgattgactgctctcggatttggagaaagaatagcttccctcagctcaaggctccagttaatcgcggctctcaactcagaacccgtacaaggctgtgaaacagaatggtatttggttcacctgaatcgaccaaagtcactggagggccagctgtgacgttctacggataggttgcataataaataaaaaaggaagttgtgacatttgcacctcatatgggctctgttttcggatgtaattcaatatcaaatagtcgctagtacaaatgaacagttgccaatatataaattttgaatcagagttagaaacctaaggttcgttgttagcaatttgattgtttctgaaattggtgcacgagaacctacccttttccgtgttaccatcacccatgctcttgctgctgctgcttccgctctggatagcgcccaatattccatcaatgtaaggcgcgccactccacttctggtgggtgagaacgtcgacaccgagctccttttcgcgggcctggacaagacggacataagccaacataccctcatccttgaatgcacgggaaagttcggtcgtgatggtggcattactatgcagaccagccaaggaaatgagctgcaggacaaatctgagaaaggttagtggatcgaagcgaaatagttgcaatgttgagcttacccttgcttggcaatatcccagacaaaggatttgagggaggcctcatcaaatccttgccccatccagttaaatgaagggctgaggttgtacacaagcttcttgcctgggtacgccgcccgcacttcgccggctagctttccggctttctcaacatctgggtcaccggtttcgacccagagaaggtctgcatacggagcaaactccttcgcgcgcttggtcgcggcagggaaccctgcggcgtagtggtagaatccctcacgagtgcgcgggctatcacatgaccacacaacaggccttttggtgtaatcgttcgccagggcacggcgacgggagaaggaaagatcggggttcttcttaacaaaggccttgtacgcatcgcgagatgactggggggcgccctccgactcaagatgagcatcgacagctacatattattagtgaatgggatcgcttgacacagaatcaatagacataccttcgtcgaatgtaacaagcttatggctcttgacccagccaagttcgaatgcgtcgatttctttgggtgggacgccctctcgttccatagcttggagggtctcggccagaggttccacctcctccgtaataccaaggatgaattcatgatcacgcacatcgatggcgctgctgatgagtcggccgctctcggaatctgttcgagcaatgaccaggttctcacatcccatcatatcccactggaaccgagctgcgaccagtcggttgatgtgttcacccactgggacgagcactttgcctgcaagatggccgcacttctttccgccgtgcaattggtcctcaaagtgaacggctgcggcgccattctctgcaaatagcttggcgagtttgagaacagccgataagccaccatggctgcaccgagatagttagtaatacttcgtgcgttcaatcccaagtattaacgtacccggtgtcaccatccgcaacgattggccggaaataatcagtgtaaggtgtggcctttcgctcttctggggtcatctttcgcctcgcgtcccactgttttcggtcgtgcatggactgagccttgaacagacgctggacctggttggggacggtattatagggataatcgccgaaatccggtgatacttcattggtacttgtcaaaagtgaagagcaagcccagcctgagatgtatagaacctcttggttgggggcttgctgcgtcatttggacggggtcaatagctcccacttgtgtacggaaacgagatcagatttgccacaattggagctcggccggtcaaggactcactggtatgaacgggctgaccggcagctgctcgttcgttgagaagattaaacagcttccgcgccatcaaagaactgggatatgtttgttgcaaggagccgcgtttgctcacaacatctgccgccgtgtaagggcgcttgatgccttcataacgaggcgaattccaccatgattccacatcacgaagctgttggtcgtaaagggcatcttccgctgcacctgctttttcttgtgtggacagcagctggtattcgtctgtggggaggacggtggatacggggggctgcacaggcgtcatccgagtataaccgcttgtgaaaggtcgcaatgaacgcgcagaaatagtagacacaacaggaacacgtcgaggcagacgtcttaccgaacggaacatgactgacagtaataatggaagaacaaaataatggttgaattgaaacagggacgaaccgaaagaaaaggaactaagaagcaaataagggctcctctttgacctcgggccgtgaacatctggggtttccccgccacttgactccgaaggtccgaaattcgctacatgactaagcgtacggtcaatggatgttaactaccgggacctcgggcctcgaccaacaacattggagactacgacactgcttcgtacatagtattcgtttatgtgcagtctttttgccttgctcgtttttcagtgccaacagtctttttacagctgaatatcccatgattgtcggtcagcggtcaggacagtatgctctcaaaatgtacgacctcattggaatggtccttattgtcatatatgacgactggcacctttttaggttgacattgtctatgagtaaaggatcttctcatcgagggctctgaggctcccaagtctgtgtggtaacgaatgttggaattcttgtgttttacgagccgtggtaaccttgcaagtgcctcttggttaggtatggcctctagttttaccacctgacttcgaggcattcttactgcattcgcctgtagtctgaccttaacatctatcaatatcaactggcatcactttcactttggcctcacattgtcttcacttcaatccttcttttatgtaggcgtgttggacctatcattcaaaagttgattatgaatactacaatatactactaattgcagccaggatgtcgaacaattctaaaaatgtcaattttatactcacaataatcaaatcagaagattcagatcacaaggttagctatgggatatagcaggcactggcgggtgaaatgattgaacaatgccattcaaaggctctattgaagcacatggctatccaagtctattgttcaacaaccgatctattgagcggattccttggggcataactcaatacacattatgctcgatggagacattcagcttggagaaaaaatagttgagctttattcatgtcgactatcaatgggctcagtactgcttagccgtatataaacctccaaaatcctctcatctagtcctttcttttccctcttcaaatctcaccaatcttctgcctcgctctcccttcttttcttcttttcttttttcttttttcttttttgtttttttttttttctttttttcgaaaatggtgctggacaccatgcctccgttctcgaagagcggcctccagggannnnnnnnnnnnnnnnnnnnnnnnnnnnnnnnnnnnnnnnnnnnnnnnnnnnnnnnnnnnnnnnnnnnnnnnnnnnnnnnnnnnnnnnnnnnnnnnnnnnnnnnnnnnnnnnnnnnnnnnnnnnnnnnnnnnnnnnnnnnnnnnnnnnnnnnnnnnnnnnnnnnnnnnnnnnnnnnnnnnnnnnnnnnnnnnnnnnnnnnnnnnnnnnnnnnnnnnnnnnnnnnnnnnnnnnnnnnnnnnnnnnnnnnnnnnnnnnnnnnnnnnnnnnnnnnnnnnnnnnnnnnnnnnnnnnnnnnnnnnnnnnnnnnnnnnnnnnnnnnnnnnnnnnnnnnnnnnnnnnnnnnnnnnnnnnnnnnnnnnnnnnnnnnnnnnnnnnnnnnnnnnnnnnnnnnnnnnnnnnnnnnnnnnnnnnnnnnnnnnnnnnnnnnnnnnnnnnnnnnnnnnnnnnnnnnnnnnnnnnnnnnnnnnnnnnnnnnnnnnnnnnnnnnnnnnnnnnnnnnnnnnnnnnnnnnnnnnnnnnnnnnnnnnnnnnnnnnnnnnnnnnnnnnnnnnnnnnnnnnnnnnnnnnnnnnnnnnnnnnnnnnnnnnnnnnnnnnnnnnnnnnnnnnnnnnnnnnnnnnnnnnnnnnnnnnnnnnnnnnnnnnnnnnnnnnnnnnnnnnnnnnnnnnnnnnnnnnnnnnnnnnnnnnnnnnnnnnnnnnnnnnnnnnnnnnnnnnnnnnnnnnncccctccccccccgccggccagctgcagttcgcagctggcaacgaaaatgacatccttgaccgaatgggggatgtcgagtatcccccttcgcctgttcgggaggatctggagggtgtgctgcccatggagggcgttgattttgtgccggtctccggtgtctacattgacaccatggtccgggatgtctccccggacatggatgtttgcgcagagtctggggccgtgtctgccttcgccccccctgctctgactgtgccttcctccgtccctccggtggtgccctccctccccgtggccgcccccgccaccaacaagtaccggcaacggtactagttgcgtttgagaagactgtgtgtgtgtctgtgccctgattttctggggcgttagctaccgtttgttttgtatatatatattctcttaatgaaagatatttctcttcacttttgttttctctacaggatattttttgtcgtagccgataatatccgtagtcctaatggtgttggagaaatgatccccgcacgatgttgttaggtattgtttatagtgattgatatccacatccacatagatatatccacagatacccgtggactcgggttggaaggacacacgagctccttcaactcggcacagcgtagaatccaatcagacatccgcgatggccgagccggttgagattgaaatggaaaacgcatctgggattctccaagatcggcgcccccgcatggcttatcatctcctctccgtgggattccctatcttccacttaccattcgctgtcagcgcctcttatctttctgtcttcatctccctagttatttgtgtatatctcgttttcttccgtttgaatgggttcaacatcgacttggtatggaaagcattaaattcccaccgattttagacccgcccgacaacccggcatcagcgcggggaaatcttgggccacaaaagccaaaacagacaaagagtcggaatggtaagtaagaatacagtgagcctacgtcttcctgttaacgaggcaagaacaacgaagaatgttacttcatcacattgtttacaagattgactcgagtctccacttttataggttgcatcacctgcaaggcaaagcggttgaagtgcgacgaagtcaagccatcttgtcaccagtgcgaaagacgaaaggtccaatgtggaggatacaagaaagacttcaaatggcgaccgttcgaagagatcaacatggcctctgggcggcctaccgtacccaaagccaaaaagggtaagtcacgggtcgtgtgagttagcctggtatactcacgaatccttttagcgaactcttcatcccatcaagcttcctctgccgccaatattggccagtcctttccgactcctccgacgactgaacaatcggcatcgccgattcgcatacagtcccacaaatttggtggctctcgttcgcctccaggctctcctttgcatagctcgccccttagtataaatagctttctttccacggaagcccgttctcttgaagatctacccgtcacacgggaagatgcttccatggtagagtgcaatgaacctccccttgatatcaatgtttcattgtccgccgactctccccctttcaattttctctccttcttggatccttttcaggattctctgtcgcttgcaaaccccttgggctctgatgtcgataccgatactgctagacatttgccgttggttccagacaagccagataccgatgcatctaggctgagcttctctcagctattggaggatgaaaacgatgacattgaggagatcatccggaaatcggatccagcattgggaccttggaatttcgccctaaccgagggagactctttccatattgaccccccaagcatgtcagacaacccatctctacccccggaaagtccggaaatgctcgtgatgcggtttgataaactcacatgtgggattttatctatcaaagatggttcattagagaatccgtggcgaacactcatttggccgttagcaaaagacgcgcctgcacttcgccatgctatctttgctctgacagcgttccattcggtaaagcaaagcccgcaccttcggatccaaggagccaaacatatgcgccagagcataaatggtctagtcggacaaattcagaatatgagggcggatactgcgctggcgactagtttggctttggcatttgccgatacctgggaccaaaacacccgcacatgtattcaacatctgcgaggcgcaaaaacattgatgtgtcaggtgatcgcggccgggatgcaacgaggtgttagtgatgaggagctggatcgcatccggttcctctataacacatggtcctatatggatgtgatcgcacgactgacttctttggatgaatgtggtcctcaaaactgggattcttcggttttcgagcttccaagtgatacagtccatgatattgatccgttgatgggttgtgcaacgactctataccctcttataagccgggtcgcgaaactgatccagcatgtgcggaagagcacgtcgaacacggtgtcggttgtggcccaagctatggaactcaaagctctcgtcgagcaatgggagccaccgcaatggtttgagccaccagatgaccccaactccgaggttcagcatagtattcaagttgcacatgcctatcgctgggcgacgttgctatacctacatcaggccgttccagagataccctccgagccggccgatgaattagcaaagagggtcctgatcttgcttgccactgttccctacacttccaggactactatcatacaaatgttccctctactagcagctgggtctgaggttgacactgaagatgaccgaaaatgggtcttggatcgatggaccacaattcagtctcgattgatgctaggtggtgttgatcgctgtttggaggtgttgaaggaagtctgggaacgtcgcgacgcaatgaatgctagaagagcgcgtgaaatggccagttcgcgacgtggcgagtctttctcatctggagatagggagaaaatgagctcgtcattgccagccgatttccgcaaatacagtctcaatggttcccacaaggggccaactggaaggccaggacaacctacatcgaggtctgcgcgacggggttccgcactcgccccgcttgaaaacattgaatttgaaagaactgtgcgtggcagattgcattgggtgaatgttatggctgaatggggatgggaaggtgggtttgacaactttcaaactatttcctccaaaagctaactctgcaactcatagttttccttggctagcctaccagcaatgaatggcccaaaccttggttgaaattgggtgccatgcgaaaagaatatactgttctttgcattctagcctgctgcactaatatgacagctaacaaagcaagcaagtctgagttcttgtttcctgatttttgttatcatgtcctcattcctgtgtctctactttatttgtcctaaggttgaaattgtacctgacttggtgttgccttgaaccagcgcggcgtctagggagtctgttgttctcttgttgatgagttacgacaacgatgttttttttcgattgagacttgttttctacaactgtggtcgtcgctctgacaacgaattatggttgatctaggaactaatatgtccaacatgatggtggtttatttgacttccacgctttcattcagcttttcaatacgcgatacccattccggaagcccctaagcgactacccagtttttggcctattgatataattccccaatgctgattctctatcgaattttcagtaatacggaaaccatgatcagccctatcagagtcaggctcatcatcttctttgccatatgcacccgatacatcagctcgcttggccattattaccgccctataccggaatacctacctaccaacactgatcatccgacgaaagcagtaacccacatttgccttcgtaggcgcgacccagcaaggcctggtctgatattgtcccaactgcgaaaatgtaaattccaggaagctatattttcagagagactattctctgattcttacaacaatctacacgatacccaagtctctggcttcccttacgcgctgaggaactatgttcttagccagattcttgggtggccctgatacagtacgtcctggtcccgatcaaattatgaagttctgggagttcacaatctatcaggatttgctcattacatcgtgacatctttagagttccttaaatcaaattgaaaggaacgacgatcaatatccagatgcatttggttgttgacgagtgcccctaggcctagaggcgattattccccaggagataccgctcaccaattgctgatttgtaagttgagagttttagaatttcacatccatctaatttgcaataggtgcgtgaaatccggatcccctcaataagggaatacaaactgctcagcttttgcgccaagaataggtacgaaatcttcaccctcacaaatcttcatggccttttgataagcaggccgatcaccaacacgcttgagataagctagaatgttcttatgcttctccccatcaaactcaatcggacaaaatcctctcatggtagtgagagtacagattgccatgatatccgcggcggtgacgtcattcccaacgaggtaggatccggtttcgccgagtctcgcctcaaccattgagagcgcacgctctagtttcgcattgcccatcttgacgtgcactgattccgggtcgctggtcaagcgccgggttatcaggacacggaataaggttggctgtagggaggcattcgcccagtggtaccactccaggaaatggatgtattcgtcgccgtctttcggtgtgcgcgcgagacggccctctccgtaggcggcgataatgtaatcaatgatagcgccagattcagcgagcacgaccttgttttttgtgaagggagagctgtcgtcttcgatcaccggcgcagtgccggcaggatgcaggtctttgattgattgcggggagaatatagggtcgcgcttgtggaaaacgaagtcataatcgatgccaagttcttcggcaagccagacgatgcgctctgattgcgagcggccaaggtggtggattgtcaatggcatcttggtttgggattgagaaatgatgaaggggtgttgggctgttggcgatgtgggatgggaattgtgtcgagaaaccaagtagtgatactctgtaggatcgtcggcatcgtgataggggccgtctccgcttgaccttcaccgagattcgtcaaattcgtacccctagatctcgacttggacagctccattacttgagttatgcggcaatcggatttcgtcaactcgcggtttacatatatgatcttagtgaaatggcaatgaggttaactatgagtgtctagacccactcagccattaaccaatacatgttgatatttaagcgcttcgtctgtctaaatatgcataagacttaaagcgaatacggaaactagcggagaaaaagtaccattaaagctgattctctgaagatgcgtcaaagcgggggatgcatgaagtacaggggtagcgttctcgttttgccgcgtccacatcacctctgtggtttgatcctgtatctacccacttacctgaatagctaccctcgaaaataatcacccgaagcagcattgcacagatcactcgtgtccgtcgatttgacatgatcaacccccaagacagattttggtccgacgcccaagcctactgcggcagggtcgaagaccctnnnnnnnnnnnnnnnnnnnnnnnnnnnnnnnnnnnnnnnnnnnnnnnnnnnnnnnnnnnnnnnnnnnnnnnnnnnnnnnnnnnnnnnnnnnnnnnnnnnnnnnnnnnnnnnnnnnnnnnnnnnnnnnnnnnnnnnnnnnnnnnnnnnnnnnnnnnnnnnnnnnnnnnnnnnnnnnnnnnnnnnnnnnnnnnnnnnnnnnnnnnnnnnnnnnnnnnnnnnnnnnnnnnnnnnnnnnnnnnnnnnnnnnnnnnnagggtcgaagaccctgccaccaaaacttattgcaatgtctgggattgggaccaactacggatgatcaaggtcaaaggcaccgccaagctgtttccgcccgatgggaatattgagcccttaattttggcaccattagcggattatctatcgccggaagttcgcgcaatcacagtcgacgatgatgggctactcactgaggtatcgatggatccaggggaggacgacaccatgtttattgcttatcctcgcctctcactctgtggatcgcttgcaggttgccgtacaattcagtactctaaactctgagagctcgatcggcttgggccatttgttggtctctcattgtacgaagacgagtcagggactcaaaaggtcgctttcaagtttgacgtcttatataaggctctatgactacaaatggcctgggatgaagttaatattctcaaaagtctaccaccacatcctaatatggtaccatttgatcgcgttgtcctcgatgaatctcgggtgattagtttcacaacaaagtacatcccaggtggaactctcgccaatccaaagatcccttttcgatttgagtggctacaacagcttactcaactggtggatttcctcaaccttgaatatggaatcatgcatcaagatattgcaccccggaatctacttgtcgacctttatacacataagatccttcttttcgatttcgattgggctgcatgtggagagaaaaacctacaagacggtcgtgatgacgttagtagcgttgtgctcacactctacgagcttatcacgaatgatacgtccttctcggatatcctccactgggaacgaaatatggacatagtgtcaaatactcgatattggaaagcagtgtgtggagaattgttatgtaaaattgcttgaaattgttatagtacacctatcccctgcacagtcgaccaatattttcccatttctcaagttcgactatcctctgtgtgtccgtattccttttatgccaagcattaaaagacactgatgggaagggctaaccgcatgaagtaaaagaatccctactcaactacacaatcttatcactggaggtaggctcacctaggcataactagtagtagtagacgatgagacatcaataccgtcgaaactcgggaattttctcttgattgataacggcctcccctaccattctcagatctttatctcaagcttgtacttcccctcatcactagcaagcccctcaacctctccgtgattttcccaacccattctccgttgggctgcctagtcaggatatcagatccgactatcgctattcgtctggattgagttaccctaagtttgggggagttttctttctagatgacatcccctcatttcgtacatggcagagcgcggcaacatcagtataaagcagaggtaatcctcgagaatggattggaatatcgatttatttctatactagattcctcatagtcagactgattcctcaaaccatggcagttccatttacctaccacgctaaggcgcaatccaccttcaagccgccacttattgccaatgacaacgccttcttgggtgatgtgcagtcaaggtatggcgatacttgtatagataatgtttcaagtaagcaattttgttgacatactacagcgagaaggaaaacccagacaagcccatgtcatgcggcttttaccgactggaaaagggtacccccctcgtctacacctacacctacgacgaaatgaagattatcgtcgagggcaaatttgagattgccgacgagacgggccagaaggttacggcgactccgggcgatgtgttttatttccccaagggggcgacaatcacctttacaacggatgactatggactggcgttctatgtgggtacccagctgaaatccgaatcatattccaacggacccaactaacgaaaccagactggccaaaggaagcagggcgctgcttgaggatataaggattaataagattaataagaattttaaactttttattttttaatttctcattttagaagtttccggttccgtggttgggcttgccaattatcggggtccccgtgcctccaatccatggaacactcggctgtgttgggctagttatttcccaatccggtagtttgcttatatatcccttgcaatagcttcatgattccggtggctgcacccgactaaggcctaccatagactacctacatgtacatatacatatgtatcgcccggacaattattgcttattcccccgaacacggggatgtgcgacattcgctagtctggattatgcaaaagtcaaaacccaaagtgcccacttcagtggcggtttcatgttgggaccccatagagtcaatctcacttgagaggagccgtcaaagcacaagtagcgattggaagtggagatgattttcagctcgcttcgataaactcatccactcggctggggtttagggggggtttaggcgggtttttcatcagtgtgcatgacgtggggggagttgctacagcaactccgtgaggaagggggggatagagtcgattgtagaattgagaatcaagatcttctgagatcttggtggagagggatcgacttggaaataacaaacataaaccttccaatatttccgagggacaaaggcattttcctcctttccttttctcttcccctaaccatcttcgtgactttgcctttgttctggcgtgttagtgcccattagttccggccttatcacaggggtcatcaccaacccctctatcgcttcgacatcaacaccatggctattattccagacgaccatcttggtctccgactccctaatccaccacccttgttgcatactcgtgggcaattcgatcgccccgctactcctgccgatggctttaccagtccaccacagactccccagggtagccccagcaagtcaaggttgcctccgggcgcactcgacctacccaatgtcttcgacaaggcgatgaagttgaatcccaccaccccctccaaatcgacatacaaccactacaatcatccaatgttctctgctggcaagagtggcgaggacttcagcgagagcgttatccaccaaaccccttcgagcccaacgcgtagagccaacaaggagaacacaccccccaacccaacacgtctaaaggacctgggatcgaccccaactgctgcagctctttcgcgccaagaaccataccaaccacgcgatgatacgaccagacgccaggtgcagatgcgcggcctgacccccgaggaaatggagaagctagcacagcccaaagtgaagcgcctcgtcaatgtgacccaactctgtaagtgcggcccgacctgataattttaagacagattgactgattcgtgcatgacagacttccttgaccattacttcgatctccttagctacgtccacaatcgccaaacccgccacacacaattcaaagccgcttaccccgaaccccctgctacccctgacgaagagtacgaacccgccctcctaaaatacctcggccgtgagcgcgcacatctgcggaagcgtcgcacacgtctccgccagggcgacttccagattctgactcaggttggccagggtggatatggacaggtgtatctggcacaaaagaaggatacgcgcgaagtgtgcgcgttgaaagtcatgagcaagaagctgcttttcaagctggatgagattcgtcacatcctaaccgaacgcgatattctcactgcggccaagagcgagtggctagtcaagctactctatgccttccaggatgatacgcaaatctacttggccatggagtatgttcctggtggagacttccgcacgctgctgaataacactggcgttcttcataatcgacacgcccgtttctacattgctgaaatgttcagctgcattgatgcgctccatgtgctaggatacattcaccgtgatttgaaacctgaaaatttcctgatcgactctaccggccatgtcaagttgaccgatttcggtctggcagctggtatgctgagcccgggcaaaatcgaatcaatgcgtgtgaagcttgaggaagtcgggaacacccccgttcccttcggtcgacccatggaacaacgtacaatggccgaacgacgacaaggataccagtctctgcgccagcgggaagtcaactacgccaagtcgattgtcggatcgccggattacatggcgccggaagttctcaagggcgatcaatacgatttcactgtggactactggagcttgggatgtatgctgtttgaggcattggcaggctacccgcctttcgcaggcgcgacagtcgaggagacatggcagaacctaaagcgctggcagaaggtattgcggaagcccgtctacgaggacccaaactacttcctgtcacggcggacgtgggatctcatcacgaagctagttgctgggaaggagcagcgcttcaagaatatcaaggagattcacgcgcatgactatttcgccgaggtcgacttcgagggtctgcgtgagcaacgagctccattcgtgcccgaacttgattcggagactgatgctgggtactttgatgatttcagcaatgaggcggatatggccaagtacaaggaggtccatgataagcagcgggcgctggaggatatggccgatcgcgatgataagatgagcaagggcttgtttgtcgggtttactttccggtatgttatgctcaaatccatgtcgttctcttactgaccactatagtcatcgcaaacctgccgtcgacagcaacggccgcagcagctcgccgcggaagcctatcgcgacggatggcacattcggcacaatgttctaggttcctggacaaaatgcagacttcacattcatattcggtcaatccttttctcttcttgcgttccactggcgcgtgcgggactccgagctggatcttggtttccttgtgccagatgtcccagtattgagtttaatggctcatattttctcttctttttgttttaacttcagcctcattttcgacttgcaacctgcaacgtgacacttcttctcgactcgttctgattttatggtgcgcgtggagttgtggaattcgattcttgtatgatacagccatagatcgaaaatggcgcagttcctgccttctgctagtaatggtttcattgtatggaatatggaatatgagattgatctcgatcgcgatcctgtgccgagcagactatatgtagcgcatatatcttaccgcagtacggagtaaagtatcgactcttttagtttacaggaagctggcgcaccatgcgtaggatctcggacttgtcgtctccaatgacagcacgaccattgacccagtcaacggtctatagagtatagtattagcacaacatatccagaaagatctccgatgtaacaatgggagtaaggaaaaggtcgaacatacaataggcctcacgaaattctcattatcctccttgaacttcttcaatgcgtcctccgcatcgcgggcgcccttcaccagctccgcaacaccatacgtcaccttctcgccgggattgccaacaccgctgacgggcgagatgtagtcgaggatgctgcgaagctggtctgttgtcgggggcgaggtggtaacctccagctcgaactcgccgcgctgttgctttgagtggttggtgtggtcgctagcttggtcttctgtggcggtttcaccagcggttgcggaagcttgtttcaggatgttgagggttctagtcgatgcttggatggagggggagtggaagagggtgatggggtcgagggttttgctctgtttgtgagttagatggtggtttggcagctaagggggggggtgaattggtgggtatggaggttcatataggcagacttacgaagcggaacatcttgacggtttgggtatttgcaatttggatgtgttttggtgatagaggtaggtagaatggagggaggtggaagaagtggagttggcttaagctgcagttcctggatgatgtcatgtgctggctcgggtcgtctcgggctaagctgcgctggtccgaacgcgtcaacttgatcttctctttctagtgtatattgtatgctacgaatactacgttgagaatttgagaaatgccatggggtatacagaatcattttctatgatcaggcttctaccgcctaacttggagcgatggcgtccctatgtcctatcaactctcaactccccattttgagaagggttttgaacatctctcaacatctaggactttatctaggcgacatagcctcttactgctcattgactgtccccatgcagtcgattggcctttttgtagtaggactgagcgatgtatccaatgcggttaggaacagaggctgttggggagggcgccaagtttcggggttgcgtggtattgtacctcactcgcctccagcgagtatcagattgtcacctttagtcattcctcttgttatgcctgcatatactcattagtgacacaccaaagtgccaatatgcaagaatatggacatacccaggaaatcataaaccaaagttctcaacatgcaagtagataccctgcgcgccagttcctttgtgcacagctcgttcatcgctcagagaaaccacgctgcggcggacatcgtctgctagaccacgaggtccgcacacaaccacggcactttctccttcggctttctcgaggaccttgcggatgatgattcgtggcatgggacgaccggagataatgttggaataaataatttctttgcttgcgacttcttcaggccgaagagacttcacatccagagcagccttctcagactgaacaggtgctgggccagagcaggtacaggcacaggcagtattgatatcctcgtcttcgatttgcgcagtgcaacagcaacctccaccagggagacacccgctacctgtggcaacgggagccgaggtcgatgtcgactcggcagagagagaattaatcgagacattgtccttcttggatatattcttgccttcatcctgggcaaaggtctccagcgtaggcggagacactgtctgtgatggtagtgagacagatataggcggatctagcttttcatcgcatgtaatataaatgctaatttcaatttccttttcgaaatttgaacgtgtgcgtcgacactcactcacgtctgccagcaaagattgcagttcggaatcaaagtaagtcagctgagaacgtgatttgattacccagacaaagcgtaaccgcttggtagctgttaaacgagcaatacgggcaggcatctgctccttgctgccgttgctctccagcttccatgctgagacaatatcccgcagaagaggcaccgtgaatgtcgcacccatgccacccgccagcagtacaacactgtcgaactgccgcaagggccggatgcttccatatggcccttcgataaaaactgtcgaactggacattcccgccacttgtctattccccaatagactatcgctctttgaggcgtaccggaagaaacgtctagttcccccattctcggcacgaataaagaacttcatcttattatcttctggaatggatgcaatggtgaaagggtgacattgcaatggagcgacggagtggcaagtgaggaagacatgctgaccgggttgccacccgataccggggttttcgatagtaacacaagtgacatttccaggtagtggagtgaatgtagccgagtgttcccaaagagcattggccttattctttcggtggaaaatggccaagttcgcatatgcaccccaagtgtagcgagcaagccgatcgaagaccaaaagcccaattgggatccatacccagaccttgacttcattaggcgcatgcatccataccgcaacaataaagccaacaaaggtgattagatgctggatgacaaagaactcataactgagccgacggattggagcgaaggaagtgatcacaataaaggtcagaataacccaagcggcaaacccacgcttcgtcaacggatcgttatagagctggtacgtgatataattccagcgaccccaatcacggaaccagaatcccatatggatggtggtagtcaaccacagcgtccgggcaacccagcgatggtaccagttcaaactgacgtagctcattcctgccaagaacccaataatgttctgtctgcctgccagcagaaagatcagcggcaactggcaaatggcgatgaaaccagtgcggtagccaacatcttcccatttccatacgtccgtagtgtccagcttgtagaaacacaggaccatgactaccaccaggttggctaacatgatgagaacggggccaagtggcgggaaatggagggtcaatcctccgagtcgaaacggccgtggagtcgcatagctgacttcgcggactgttgctgtgacggtggcgtagagattgaagaacagagattttggtttggcgggcgtgagtgaagaatctcgcaagctgattattgtcagtcaagatcaccggatgtcaaggcacaacataccgatggctagcaataacgcgatccagcacgttcacaagggttgctgccccgattgcacttcccacgacagcccagtacatcttctgcagggtgaacagactgggaatgccatcgcccatggacattgagcccgcaggcatgtcacccattgccatggacatcttgtgctggatgtgtagaagaaggcatgagatggaagcccactaagcatcacccaggtgtcgaggtcaccaatgtcaccaataacagagcagattaccaatattatgctcatccatgctcacctcccgggtttgggtcgaggtggggtccgccatgtggacacccgtggcaccgttgggcccaatgcggcaatgtgtaacttcctgtttcgaaggttatttctcttcttcatcttctgttgattctcatactctctctccttcctcaatcatagaatcaatcagaagacatggatatgaccagctcgacctcacacagtatgagctcctcgacgagctctatgagcatgactatggtcttcaaaaattcgcacgacacgccgcttttctccaatgcatggactcctgcatcctccggtggctttgcaggcacatgtattttcttgattattctcgctatcatcgaccgatgcctcatcgctttcaaagtaaccatggagcgccactggctcgccgcacatctcaaccgacgatatgtcactgttgctggcaaaagcaccgaagctgccaacattgactccgacccggatgcgaaacttgcatcgcttatcaccgcgcagggcgttgaagagtcagtcaaagttgtgcacaacatcactcatgggccaattccctggcggttcagcgtcgatctaccgcgagcagtcctgttcctaggcattgtgggcgtatcctatctactgtaagttctagtatttactggtattagggcaaacgctaataccacgtccagcatgctagccgtcatgactatgaatatcggctatttctgttcggtgcttggaggcgctttcctcggggaattggcggtcgggcgctttattcaaactaatgagcatggccactgaagatcttacatttgactttgatacgttttgcgcatgtgggaattatttatgaacttgagcagcatctgtctggcgttggggataatatgatacggattgacttgactctaattgctctcatcataaatctctcttttcttttccccctcctcgctgtctccgcggtccagagctgcatgcaatcagatgactaaaccctgcgcgcgcaattgagctaatttactaaccggatccggactagcccgtcggtaatatccacttttggcgctagcgtaaggctttaatttactttggtctgagttaccaaaaacagcaggtacaggccgttgtatctgacatatgaccattgtcgagaaattgtaaggtgtctggaaatatgctaggtgaagatatatgattatccagtatagcgtggtatggaagcatcggggagtgaagttcaggctatgggagcctaaagaccactccataaaacaggatcccggtgtcggatgattccgaatcatgcagtctcaaaggggaaagggtcattattgccggtatatcggatccaacggggcttcataggtggaccctgtttttgtcaagtcccgctaactccctcaccttgtacatatatgcagaactcgtatagacctccggggttcaaagagctgagttttcccactttttctaggatatctactcctgtctgattcacttgctacacttattccagctcttctattttaatacgccaacatactcccaatgaagctctccctcttcaccttcacggccatcgtgccattggctgccgcacacttcaagctgatgtatccaacctctcgtggcttcgacgaggataccatgcccaattttccctgcggtggaatgagccagtcctccaatcgtacaaaactgccactgtctggtggctcattccccgtcgctcttcagatgcaccattcccagactgccgtcgaggtccttcttgctctgggcagtgatccgggagacaacttcaacattgtcctctcgccaactttccaggtcaacggccttggtgaattctgtcttcctcacgtcgagatcaatgagaagttgatcggccgtaacctcaccaatgggatgaacgctacccttcaggtgcagaccaacggtgacccaagtggtggtctctatgctgtatgttcacttccgaatttggcggtttattgcggtatactaatacaatacagtgcgccgatatccagttctcttccgatgtcacgtatcagacaccatctgcctgtagcaataacaccaatctcgctgccaccgccttccccgaggcttctgctgcacgtaatgccaacgagtctactgctgagggtcaggcacagagcggatcctcatcctcatccacttcgacttcgactgcctctacttccacttccacctccacctccaatggtgctgctgtaccgatgcaaaccgccgcttggggatttattggtgctgctctcgttggtggtcttgctgtgctgtaaaagctgattatttggttgcttctactttattgtctttggtctcggagtttagcggtgcataataaacaatgatgtcttctctcacacgagacgatcctgttgcgctcacacgactaatcacatcgcagaatgtgacatgcacccttttgtcacttgctgatactctagccatgtttcgcgtagaagattggggtagtctgaatattgcgttctcatcgttctgctgtcttctttccgacaggatgagccttacaattaaccctatgttgcatctgctgacctctgctgcttcaagacgaaaccggcggccgataacgtgacagggaattcccagtcacctatgccgacagcgcagcgaaattgaatgtcaaattctacgttacatatagagagtacatcaaggacattgacaatttgagatcaatgatctctgcaatcgctataccctgacgaacaggtctacccagaagatggtaatcccacgtgtcgtcctagtaattattcgcaaagtatttggatgagcaaactcatagtctcggtaaaatccagtattcctcatcgcccttgcatggcagtggaaggcagatagtatgaagtgtcacgtgtgcgggtagattgacatatcaggcaactaggaaaatggatcatctcaagacatgagcatccaacaaacggagagagttgctagcatagtccagggcatagtccatgatggagaaccttgagatactgcgtccagttggtgagtagatcccgatccctgtcaaaagcagtcgggaaccttctccgaaagtcaacaatgcctgaccccagtaaggtcgattggaacaatattcaacgtcacgtcatcagcttatgttttacttaaacgttgctgtatcagcaaattatttcctaccagactcgttcgtgctacctgtcaaagactatgtctatcaggcatgcgaggccgcaatcgcggaacatccgtcgctatccgccattgtggcggacggagaaaaaagagannnnnnnnnnnnnnnnnnnnnnnnnnnnnnnnnnnnnnnnnnnnnnnnnnnnnnnnnnnnnnnnnnnnnnnnnnnnnnnnnnnnnnnnnnnnnnnnnnnnnnnnnnnnnnnnnnnnnnnnnnnnnnnnnnnnnnnnnnnnnnnnnnnnnnnnnnnnnnnnnnnnnnnnnnnnnnnnnnnnnnnnnnnnnnnnnnnnnnnnnnnnnnnnnnnnnnnnnnnnnnnnnnnnnnnnnnnnnnnnnnnnnnnnnnnnnnnnnnnnnnnnnnnnnnnnnnnnnnnnnnnnnnnnnnnnnnnnnnnnnnnnnnnnnnnnnnnnnnnnnnnnnnnnnnnnnnnnnnnnnnnnnnnnnnnnnnnnnnnnnnnnnnnnnnnnnnnncacccgtcgctacccgccattgtggcggacgaagacacacgagacccctatttcgtacggctgccagaaattgatcttgaccaagttgtgtctttccaggacagaaaaccaggcttgttaagtaccgaagctgatggcgagcctaccccggatcttgacctgcaaaccttgcttgcgaccgagcataacacgcctttcagggctccaaatcctttctggagagtctctgtccttctagatatagaagatgagcggcaatttactgtggcatttgtatatcaccacgccattggcgatggaacatccgggaaagccttccatcggaccttcctacgagccctaggcgtaacggagtcctcggaccagactatatccatcgtcaagtctccaaacctccctcttttgccaaatatcgaggaagtgcacccaatgtctttttccttactctatcttgcgaagaaaataatccaggaaaaagtatactcccgacgacccacaggtctatggactggctccaaggtcctactccccactcaaacccgcctgcggctcgtgccattctccagactccttgtcaaggcagtaagagacagatgtcgacaagagagtacgacaatcaccgcacttctgcagacgattgtcgctcgctctatcttcgcacacatcccgcctgagttcacgcggctcgcctgcaccggcgcgctctcgagtcggcgctggctgccagattttatcactgatgaatcaatgggtgtctgggtccaagactacgaagagacctattcccgggcgacagtcgcaccgtctgaaggcttcccatgggcagaggctagacggtctcgtaagacgattcagtctgtcctgaaaatgaaagggaaaaatgctagcacgagtctgcttcagtttgtcgataattttcaggaggaattgtgtttgtccaaggttggcaaggaccgtgataagagcttcgaggtgtcgaatatcggcgttttggacccgcaaacaaatcctgacctgccttctatcaaggggatggttttttcccagtgtgccagtgtgatgggtaatgccattgaggtgtcggctgttactggtggggatgggtgtttggtgctagctgtctcttggcagcaaggggttgtggaagctgatctcatcaatgaaatcgtagaatcgaccaagcaggacctatattctcttgacgtggcgtgatcaatggggataattcttgcttgggtatagactttttaatgtttaatagtgcatccatagacttatcgggagcgctcttcggatgctgttatcaggtgggcggtgagagggcgataacatcggcggcagaatcatagggaatctacagtctgacctttcccaaccttcttgttaacatctcataacatataactatcaactttcaatatgactcgtggcccctacattgttccggcgctcaagaagcacactgccactgtcatcatggcccacgggctgggagataggtaagtgtatcgctggaagatagttaaacgctagtatcaagtctaacagtgttcgaatctagtggtgccggatggtatgaaaatgcccatcaatcgcctagcctaagccaatgatcgtcgcatctgaccatgattttctaatttctaataggatgtcccttgcccagacctggcgccgccgcggcaagttcgacgaggtgtccttcatcttccccaatgcgcccgacatcccgatcacagttgtatgtgaacctcatattcatcatcaattgaatatcaattgacgagatttcaattagaacttcggcaggcccatgcctgggtggtacgacatctcgaaacttggcggtgatgtgagccctccatgcccaaaattgtcgaataaactcatagtcctgaccattatctccttctatctagttggaattcgaagaattccttaaaagccaggatgaaccagggattatccgctcccgcgactacttcaatagcctcatcgagcaagagatggaaaagaatatcaaggcttcacgtatcatcctgggcgggttctcccagggaggtgcgatgtccgtgttcgccggtgtgaccagcaaggaaaagctcggtggtgttttcggtctatcatgctacatgctattgagcgaccggattaagaactacctgcccgaggggtggcccaacaagaagacgccgtttttccttgcccacggcctcgaggataacgttgtcccattcgcatctggcaagacttcggcagctaaactcaaggaactcggcctagagaatgtttccttcagccaatacgagtatgttttggtcgctgttgttctggattgtgatggtctgcttacttgatattcctacgttacagagatcttggtcactcggcgacccccgaagaaatcgatgatctagagaagttcattgagaaagccctcgccactgaaggagagggtagtgcttctgctggcttatgacttagtcatgatcagaacgagaacaccgaaattggtctttggagatataccttgatcatgggttttgtggtactgcttgctgctgtcatctggtctagatatcagttgtcaaagcagaaacaatctatacagacgcagcattaacaaaccgagcccagatccagctttgagatacataatagtgcaattcaataccggtcttgtaagtgtgagtgataaagtcgggcctcgcctgcttagcgtaggaacctcggaatatatatatctctatgtccatatgatgtatttcaccgacgcatttactccttatagctaggggatatttaccgccaggtggtattaaatgtacatttaaacttaagcttgctaatgccaatgtaatttatgatagcgtggtcaatctactacatgtgcgcagttatcctagcatctggtcggtcgaccatagacctagaagaaattctagatggtatgtggatatatgcagcgtgatgcagtagaagaggtttgcttttagattataatattgaaaaactcttcagaagtcggtagttgtacattgatataagcctcagatatcgaggctgcagatgcaagatgagggaagagtcgcaaacgtatcgtacagccaataaaatcatgacatacgcccagggatatccaagattgcagatagtgcagaaacttcgggcattcgaagcctcgagattggaaagaacaattgtgggaggagaaaatggaacactggcaggagaggtggaggaggttcggagatgtagatagatcaaattctctgtgcggacacagcatgatcacagatcaatagtcgaggcgcaatggtctagtcgggggattatttttcacccagcatctccttgcgcatctcctcccgttgtgtccgcgtttgttccttctcacgtgcgcgttgtgcgtctagagctgcttgctttttatctaattcttcctgggcggcgtaccagactagaagaattggtcataaccattagccacggatgcactcccagggccgagcgaacccgataccgcagatataatcatctccagggtaaattgcgagtacaagacatactagacttatcggacttggaccactccttcagcttagtgacgtagtcatcgaattcctgcgcccggcggtctccctgttcggcgctgcgcttctgcagatccgggttgtatcgctttctaagctcttcgtcggagggtcggagatattcgacaagagcggggccaccgacgaccatgaggaggccactacggtgagaaccgaatgtgagcacaagtttttgtgacgatgcaggcgagtatcacttacccagctatggtcttcgcccataatccggcgcgagacattgtggtaaatccgaagcgcggatgctgattaccgatttgaggcttcggtatgacgatgtgtttctcggatgactcggggagatataactcgagatgctgagaccgatggatcattaacatcatcgcggctctcatttgctgttagaggcggcgtggcgcagccgatgtggcgcagtaatacgctttgcccgatcgagcgtgccacttgtatcaatttttgtcgcttgttccgtcattcttgaggaagtagtccgagacaggatgtggagtctgtcatacatatgtatacttacaaagtccatacttccgaggtagcgacatgttatacggagtacaagcttgggcagtcctcaggggtgctgtgctgcccgattggtctagggtttagtttaacttagtcatcatggtttgacctcgggacccctgagcagctgtaatccctacataactatggctaatatcacggagtacaagtacagttaccagggaagtacaactggatgccaacaagtcccgtcgggtttgaaattgagattgtgatgggcttgcaggacgacatagtgtgtaggatcccgggccccagcttcacccctgatcgtcaggcaccgagtggactgaattacatgtactccgtaactttcgagctttaccttcacatacaatgatgtactgtataacagctgtatactgcatcgaagcatcaaaggcagtgagaataataaaaggaatatgggtctatgacgatactgcagttctatattccccacttgcgttagtcctctaaacggccgcaaaggagattggatactataaaaagggaaagtataataaagcatgaagagcatgaaatgcatgaaaagcatggaaaatacgaaaaacaaaacaaaaagtgtctggcggttgtgggtcaagcgatttgtttaatttaaagggtcacctgcgaccgcccctaaatcattctgcccccgcttgctttactctttacttgaacttcactgaactcactttggagtgtggctcctgaccaccctcaggtgcttgatcagcttgcggcaggcgcgttggtcattcgacactgcggtttggctttgcgcgaggtacctaggtaaggatcagtgtggagtcccaagggttgccttctcaggatatccatggatcgtgaaatgaataagctaactccaaattgcagccctggacccctggagtttaccgaactgtcttctccttgcatgcgactgcccacaagatttgcacgatcgtgaacgatcctcgaagactactcgaatcaccgttgtatagtacgcttgtcggcctgcgccatgtcatacccccaacaacatcaagcgcagaggccgcctttgcgacaatacagcaatccccctccgcgttctgtgacatcgccaggaggatattcgcaagatggctcccacggaggatacagcgacggtggcatgagtagccatagctaccagcagactgaccccggctacgacgatgcggcatacagctaccagtccacctcctccggttcgcaatcatatgcttctatgaaatctcagccacgctcgatgcgaccgccgggaccaccaggtccgagaaatggacgaccgccaggccctggatacgatgatcggcggggctatcctcctggcggaagaccacccccgcaatcgcggtcaagaacacgtacgtaaattcagacagggaccccaaagccctactaaccgactataagctggcgcacgcccacccccaggcggtaccttcgataatcctttcccctcctttccaagtcgagacccaagagatccgaggccgcctacagacccacgagatcctagagcacctagagacccaagggatcggcgcggtccgccacgagggctagagaatgatatggctgcaatggacattaatggcaggggtcctcctagatcgcacactgtgaattccgatggaagacggccagatatgcgacagccacctccgcgcggaggtccgcnnnnnnnnnnnnnnnnnnnnnnnnnnnnnnnnnnnnnnnnnnnnnnnnnnnnnnnnnnnnnnnnnnnnnnnnnnnnnnnnnnnnnnnnnnnnnnnnnnnnnnnnnnnnnnnnnnnnnnnnnnnnnnnnnnnnnnnnnnnnnnnnnnnnnnnnnnnnnnnnnnnnnnnnnnnnnnnnnnnnnnnnnnnnnnnnnnnnnnnnnnnnnnnnnnnnnnnnnnnnnnnnnnnnnnnnnnnnnnnnnnnnnnnnnnnnnnnnnnnnnnnnnnnnnnnnnnnnnnnnnnnnnnnnnnnnnnnnnnnnnnnnnnnnnnnnnnnnnnnnnnnnnnnnnnnnnnnnnnnnnnnnnnnnnnnnnnnnnnnnnnnnnnnnnnnnnnnggtccgcgcggacctccaccagggcggggccgaggtggctatccaatgggtccagtgcgagctgctagttcaggcagaccaggtcgacctgatagagactatccagactccatgggcccgtctatgcatccgccaccaagaagcgcaacgatgccgctcgccccaggcgcaccactctactcaggcgcaccactctacccaggccagtcgacctaccaagaaacagattacccagcgagctccatgaaggaacctcttatgcgtcctgatactgctgggagcatgcgacccccacggtctcgtgcccccaacgatatagacccaggactgatgatccccgccactacattgatgatcccccccgagcccgccaatcgtgtttcatatgcgcccaaggactttctggacagctattatgagtctggtgctggtgctgccgatgaacccgatatgcctaatttcgatgccatgcccgaccctcgtcatgccccgattgatgagatgggtttggacataacacccgtcaagagaccggtccatggaccgacttcttccctcgaagagtactcatatacccccaacgggtcggaggctatgaaatcccaatctcaaccaaattttcaacaagcagacggtgccggtgccaatcagtttgaaaatgcgggatttcagtttggtattcctggagaagcttcccatgctcccgctttcgaccacccaggctctgctgggtatgtgtcgaacggttacgaagattacgccggttactcacatggctcttcccctgtccgatccaaccagccaggctattcccacgaccaggctgagatgtcagatcctcatcagaatcccgatactcttactcaccacccagcgccattccgccccggtcacgatcaaggatccaaacctgcgccggttcggcagtacatcactcctgaatctatcccagcccttgctgctccacagccaatgatgcctagtggaacggttcaggcgcctgtcacgattgaagagatacagcggctacaacaacaggcgcgagccaatccttctgatcagaagactcaacttctactcgtcaaaaagctagtcgaggcttcgacggttctggtggaggacaacagcagactggatccgaaaaccaaagccaaggccaaggagaagtacgtgatggatgcacataagatcctcaaaaagcttgttacagccgggtattctgaagcccagtttttcctggctgactgccacggtgagggtctaatggggctggaagtcgaccccaaagaagctttctcactatatcactctgctgcgaagcaaggccacgcacagtctgcatatcgcgtggctgtatgctgcgagatcggacaggaagaaggtggcggcaccaaacgtgatccattcaaggccgttcaatggtacaagcgcgccgctgcgcttggtgatacaccagccatgtacaaaatgggaatgattaatctaaagggactgctgggtcaagctcggaatccccgggagggtgtatcgtggcttaagcgggccgctgaccgtgcggacgaggaaaacccgcacgctctccacgagcttgccctcatgtatcagaacgctggcgggaatgatatcatcgtccgcgacgagcagtatgcctcccagctattccatcatgctgccgagctgggctacaagttctctcaattcaagcttggtactgcttatgagtacggtctgatgggatgccctattgacaaccgcacgagtatcatctggtacactcgtgccgcggcccagggtgaacatcagagcgaactcgcccttagtggttggtatcttaccggatcggagggtattctatcgcaaaatgataccgaggcttatctgtgggcccgaaaggccgccaccgcaggtcttgccaaggcagaatatgctatgggatatttcaccgaggtcggaatcggcgctgctgctaatctagatgacgcaaagagatggtactggcgcgcagctggtgagttgacctccctttgactgtttttcgctctagccaactaacctttttttcagcccaaggataccccaaggcccgtgagcgtcttgaagaccttaagaagggcggaagccgaatgcaaaagactcgtctctcacgctcagccgttaacaagcagagtgatggggactgcgttctcatgtaattggatatcttcgtccttcatgatttgccacgcttgaaatatggcttgcatgtatgcatctctcttcatgatcaccggcgcttgatgtattctaccccggtccagaacgcttctcttctaccccatggactgctggattactttattttcttacttgctcatatcctttttttttccaatgttcttccttgtttcgaattgctcttcttttctttaccttctttggtcccccattttattcttatttttattttttacgaatgggatgtgcatgactggaatggacacggtgaaaccaatatcaactggctgtagcatttgtatacattaatagattgttgaacgaattttctttttaacgtacgatgtatacatatacgaagaagtcccaattccccttgagatacccgtaaatccgagccaaagctgcagagcggatatatgggtcgtcaacgggtgaattccgcactgactggatttaatttccaatgcttggccttatgatcgggctctctgcgcttccaaaagcatctaattaatcagctctagttccctggaataagttgtctttctttttgtctgaacatttcaatataaatagaagctgtttggtgatttctacaaggtagtacattgccagctccatccgaaacaagccatatatgtcttccgaaagccgacataacgactcggaaacacgaacaccccattcattcagcggacacaaaatcgctcttgtcactcttttgaccgttctcacggctgtacttattgctctattctgggaagacaccgccaatctgttcggcttccgacgcctccttggatcctgcgcgcgctcagcggcagtacctctgtctgcttcaacttccattgcagcagctgcgacagtgaagggaaactcagacgtaaaatccagcatgaaaacacctatttacttcctcagccatggcggggtaagttatctatatcctggttcttatcatggactaaaagctgatttaatacccacagccaaacgtcatgtacgagaccgatcacccggcttaccgtaagctcggggagattgggcgcgagataacaaccaaggtgaagccgaaggctgtcgtggtattctcggcgcattggcaggccggtcgaaatacgatccaggtgaataccgccgagaagactgatttgatctatgagtatgtttgatatcgaaatcatggaaattccgaactaactggatttagcttctatggcttcccaggtcattactataaagagaagtacccaaatgtgggtagcaaggaattagcaaatgaagtcctgagattgttgaaagaagccgatatcccggccgagggcgttgagcgcggactcgaccacggcatctgggctagcttcaagtgcggtatgtgacaatttgcatcaaaacggaaactagacgctgacgaggacactgcagccttcgagccagaaacaaacccactgaacgttcccatcgtgcaagtctcgctcttcaacacagaagacccagaccagcactaccgactcggacaggcagtcgcgagtcttcgcgagcagaatatcctgatcatcgtgtccgggatggccgtgcataacctgcgcgatatgcggtttgcctttggcagttcgaccccgatgccgtatgcggttagcttcgacgaggcgcttaaggatgccgtgacgactgcgcctgctgaacggcagaaggccatggctgagctattaaagagaccagacgcacgccaggctcatccttccttcgagcatttgctgcctattcatattggggctggtgctgcggccgaggacctggggaagaggatctggacgttccccgaggggagtatgagctgggcgcagtatcggtttggtgaggttggcaatgttagtagcgcgttgtaagagatatcatcgaatcatcaccggaagtaattaaattggatttgttttggatatgagcttcgatttcatctataggtacagaagatgggcgtaggacggtgggaacgcggggggcataaaatagatctgcagagaaacaaaaacaagttatagctcctgcttcaccaattgtgtaatgcgctcttcgatctgcgcgtccgacaggcctagaaacatcaattagcattgcaacctgatgcaaaattatggttggcgggggatatttaccggacaacccttcttgcttctccttgccgaaagctattgagagggggggccatgttagcttgattcgcttatccaaagagctcacacaatgggcttagaggtgttctgccataccatatcgggcatagactcgcggctgggtgccagcggcctcccggatcatgatgggagtctgggggttgtgcttcttcatagtcgggtaggcgcggttcaagaaagacctataggcacaaaagaaggtcaatcagtgggctggaactccaatcggctatggataggggtgtacgcaccttgtggccgcgctcgcttcggaggtctggcagaagaggaagcggagctccttgaggccttgagtgaaaacgtacttgccagtcatagtggcaggatggtcaagcatacgtaagtattaggcaaatagaggtctcggatgagccacgggggaatggacgtgggagtagtgggattgatttgctggacagtctgcgatgcagttcattattcacgacggcgttgattcgttgcgcagccataatcccgctagtcccgatatcaactagcgcaccatgcttactcagcttcaacatctaccgaggcctcatatctagcgacagcgcaggagtgatgataagtaggggataattaatcggagtagatgatagggattacttgagagtactccttttatcttctatagactatatttttatctacctgcgggtgtggtgctttagtgcgctatctaccgctcccaacagaaacaccgccgccgccttcaccgacgaccttcccgaggttcatccctcttctttctcctcagaaccaccatctcagctatcaacatgtcttctcgcgttggtttccgctttgtaaacaacgctcgtttcgcgttccgcaatgcatctgcgccattccgtcggccaggtgctcagggcttccgctggcagagctccgaagccggtgctgctgagcatcagaacgccttccagcgtctatggaacagccctgttggtatgaagactgtccacttctggtaagaattcgaatcatgctgcattgcttgtctcttttgctactacgaattgatgctaacttcctgtttcacagggccccggttatgaaggtatgataactcgatttcctggtctgacacaccatctataccccgagctacccttccggatacaacgtctctatcagacttcaccgtatattgcgaggattctctccgcgcctgctgagtacgatgcctaacatattcttctctaacagtggtgcctggtcatcgcgggtatctccgacttcgctcgtcccgccgagaagctctctctcacccagaacgctgctctgatgggcactggtgccatctggactcgctggtgtatgatcatcaagccccgtaacgtcctgtatgtggaacccgatagcagacccgccggccatcaatgctaacacgacataacttcataggctcgccgctgtgaacttcttccttggatgcgtgggtgccgtccaagtgactcgtattttcttgtggcagcgcagccagtctcactcatccctcgaggccgccaaggtgattgagcatgaagctgttgactccgtcaaggctaccgccgaggcggctgagggtgccatcgagtcggctgagggtgccgtgaagaaggctattaagaagtcgacttagataggaaaagaattctgtgaggacggcggggggacttggaagagtgttcctgaatacatctcaaccggtatctatagccacattttacctgcgccgaggtgatccttcaggaatcttgaggtcaagcgagcttgcttgcttgggtcgaccgctggctcgtgtcctcgagaattcagtcctctaattaaacagcgttgtacatataaaccatgtttcgaaatgtttggttactgttccttctgcgagacatggtcaagaattccgaagaaatttactagcattcgtcttgtaatcccaactatcttctgtttggtagttactattcagaaaaccatggtgctgacggtatctcgctccattgcttcgaaatatattggatctagggactttacccaatttatccgggattttcctcccaaccggagaaacagcgccaaatattcctcctatcaaacttgcttggggctatgcttacgcaatgcgaatcaatttatctcctgtctgatctttgacgagacggaaactcactatacaagccattaccataccccggtttctccgcacattgcggagtagcttgtttccccggaataaattgaaggggatgtggttaccccatcgcatgaccgcaaagggggatgcctagctttgacccagttgagctagattggggtaatcgaggaaataaattgttaatgcggagaatatataagctgttctggaggtgctcgagccgagaggattgtcaatctaactcaaagaatcctctatatcctcttgacaccgacgatgaagatttcaagtactttcaaccaggccttgggattttgtttgctaattagtgccgcagttcaggccaagggatactctcgaagcgaggcgtgccaaccgcaccatccattcaagccccttccgggcagccaggccagaactcgcacctgtcatgtagtcaatcatggccatggacgcgacgattcagccaatgttcttaccgcattgaagaaatgcaacaacgggggaaaggttgtctttgatgctgacaagacatacacgattggaaaggcacttgacatgactttcttgaagcatgtggatctcggtatgtaatacgcgttggcgtccaatatgagacgcgtgagtacttacgcaagctgccatagaaatccaaggccatatccaattcagcaatgacacggattattggcaagccaacgcattcaagcaagtctaccaaaacgccaccacgttcttccagctcggtggtgaggatgtcaatgtttacggtgagggtactctggatggtaacggccaggtctggtatgacttatatgcagaggatgccctcatcttgcggccgattctggtaggtataattgggctaaatggaggtaccattggacctctcaaccttcgttattcgcctcagtggtatcactttgtggcaaactcatccaacgtcctttttgacggaattgatatcactgggttcagcagcagtgcgaatgtggctaagaacaccgacggatggtaagtcatctgatcaaaagaggaactagcttcatgtaactaataccttacatagggacctctatcggtcaacgaatattgttatccagaactccgtgattaacaacggagatggtaagtttcttttggaaaattgaagccggtcttcttttactaacagtatccaagattgcgtctcattcaagcccaatgttaccgacattctggtccaaaatcttcattgcaacggctcccacggtatctctgttggctccctaggccaatacccgggcgagattgatattgtgcagaatgtgctcgtctacaatatctccatgttcaacgcatcggtaggtttagtactggagtgacataattgcgtctctaacaatcatgaaggatggtgcgcgtatcaaagtctggcctgggactccctctgcgctctctaccgatctccagggcggcggcggatcgggcctggtgaagaacattacctacgacagcatgaccattgacaatgtcgactatgccatcgaagtgacccaatgctacggccagaagaatttgacactctgcaacgagttccccgtacgtgtccatcaatcttctttgtccctcttttcttcattccgaattgatatcgtcgctatggtttgtttctggtcgccgaaggctaacacatacatcacacagagcaagcttgttattgaagatgttttcttcaagaattttaatggtgtcacctctgggaaatatgacccttatgtgggcacgattgtctgctcaagtcccgatgtaagtgcctgagcaccaccggctacaactccccatctgacttgtacaggtttgctcaaatatcaacgccagtggcattgacgttgttagccccgatgggaatgatcagtttacttgcacaaacgtgggttcatgttgaatattggtgcaacgctgaaaacagatttactgacttattcctctggctgtttaggtcgatgacaatttgctggatttgaactgtgcttcctctagctagtgatgagaagtgttggtacatactgcatgatagaatggatcttgtgagtgtttccggggtttaaatctactcacatcctgtacaaagtacagagtagctacttcatggaaaacgttcacttcttcccgagaccggatttgatgccggtttacaatagccgagcctgcctactccatacccgctccatacataggcagagatagatggtactgtttcccaatcataccctcacattggaatttgctatcaatccagaactacagccagccacatagtctatagaccccactattattacatcccgtgtgcgcctggcgatgcatatgtatgcacacaatctactctggtttccactcgattacgtcgatattctttttaaatatctcccttgcttctttttttttctatgtgggcttttctacaccgcattgctggaactgaactctgtattgttcgggattcctgcgctgagccactgcagacatgtatttaacctaatgacactcccaaacaatattttcataccccatttagaacttctttgcaaatccgagtgacagcagaagaaatttctcatatttgaaatccaatacctttcctctcggccttccttacatcaagatctatcatgcatccggattcccaactcgagaccgccgtcaaaaacggctttgacccaaagagcctctacagtacagagttgacgaaggtcaatgagccagcgagaacgattctcgagcaatacagcaagattccagcggagaaggttttgcaacatgtgaaagatttggtttgtggctcaaccccacacgtgaacgataacatttattgacactcagtagaaagatcgtgcctttgaagttgtgagatctcctctaagtccatcttttctgaggtcaaagggttgttggctgatttgcatacgtgttagttcccttatgcctgtattggacaagcctcattccttgagctgagcatcgcatcgtccccatgttatcctgagatgcttgaccgtgtcaagaagggagacagactacttgacctgggatgtgcatttggacaggaactgcgacaattggtaagttgtgtcgagcaaatgaataacatccgacgattgcatctttcccaccttaaccagagccggctaatcagaataattccggaaattcagatctatgacggcgccccatcgcaaaatctgtatggaacggaccttcgtcctgagttccttgagcttggccttgacttgttcctggatcgctcatttatcaagtcccatttcatcgatgccgatgtcctcgatgataaatctgctctcgttactcagctgacaggcgagctcaacattgtctatatctcccttttccttcatgtctttgactttgaaacacaaatcaaggtagccaagagggtacttgatttgcttgccccgaaggccggttcactcatcgtgtgtcgggttgtggcctgtcgggaccaagcgatagggaacgccaccaacgcgcgcctgccatattattaccatgacttggctagttggaaccggctgtgggagcgtgtgcaggaagagacgggactaaagctaaaagtcgacaactgggaacaggatgatgctttggcaaagaagcaccctctagagggcatctatatgctgggttcatcgattcgccgggagtagggctgctcgtctgtagtacatcacaatgaaacatttgcaagtggctgtattgtatacgtcgtaatttgaattgacgatcacggcagggatggcgaactgaacgctggcaacgagacaacctgattctgatttaagcaggactaactaaagacaagtatgtgactatgcatcatatttgttcattgtcattttatttgaacaacaggtaatacgccgccttcactagttacctgtacatgcatgcatacgtacggatagatgtatttatgtatcgaagttccactattttaaataccaagtacgtacgatacaatcaaaaaagacgagtttatatgtattatccatgtaacggtatgataaggatagtgacaacataaagcctgaacttcgaaggttcttcttctctctcctgatatgttatatctttacccaagagtgatgcaatcatgggattcttttctagcacacaaccacctcgacctgccaccgtgccgagcgatgagatcatccctctccatttctggaatactgctttatgtatgcgcggcacggttttggatatctcgctgaaatttgatgatgtgttggatacatcaaaactgcgcagtgcgctcgaggaactgctcgagatgaaagattggagacagctgggtgctcgattgcgtatgaacgtgggtggtttgagaccggcctccgatttacacgcttaatgctgacccggaacgacctgatagccaaatggaagacttgaatatcatattccaacgcgtttcgacgcctcgcggccggctttcgccatgaccaatgctcagcacgagacaagcattgccgaccacccccttggcgccagaataccacatgcaaccagcacgcctgccatctttccatcacctgatgtgttaagccctttattacgcagcgaagacgcacccaaaaatattgatgactggatctgttcagaccggccccaactatctatacatatcatcaccttcagtgacgccacactaattactgtcacatggctacacacactgacggatgttatgggaatggcattaattttgaatgcgtggactgctctacttcgagggaacagagaggcggttcccaagctacaaggtttccgactagacccgctcacagaactcggccagcgcaccccagcggaaaaatacatgcatttcaaccgtgtgtttggccgcaaagagttctggtggtttatcggattgaatgttcttgacagactgtggtaccgccaggaggagcggcgtaccatttgtattcccgccgccagtttgcggaacctctgccagcaatcatccagtgagatctgcgcttcacgcgggaaagaagagccagtgccctttgtgagtgaaagcgatgtgctgttgggatggtgggtgcggagtctttacagcgcgctggggctcaggacggaccaaactatcctagtgaacaatgcgctaaacctgcggacatctttgcatgaatcctttacgtccaacaatagtgcatacatgggaaatgcactgtgcatgtcgccgacctttctacgcggccatcaggttgccgacgagccgttaggccaaattgctctccggattcgagaatctgtaacggaacagcgaaccccagagcaggtcgaggcgatgacagcacttcaaatgcagacgatggaacagacaggctatctggccttggtcggcgatcctcggatgatgctgctatcttgctccaactggcacaaggcccgtctctttgacatagacttctcgtcggccgtgttacaaagctcgggtccgtcgagcctgcagaaccctcaacatacaggaaagccatgctatgtgaatggagttcagcactccgcaaattcatttcgcaacgttctttcagttataggaaaggatgctggcgggaattggtggttaaccggtgttctacgaaccgatgcatggacgcatatcgaaaaacaattgcacaaattggggtcgagctaggttgtattcaaagtatcacaattaatgagctatattcatgtgatgtttttttatatcggtgtacggtgacttgaatttaatctcttggatttgtatttccaaggttgcgatacttgcctttcctgtaagagtaatgtattggttaagcacattatcccgatataaaatacagagcgtgagatatgttctatacggagtacataaatacacatacaactaaaatactcgaaaaccgaaacgaaattgttttagcgtgagatcccgtctcgggccgcacgggacggactagacccataatcaaatacggctatacggtatgttatgtgtgtgtgcatacctgaaatgtgatacagctatttacatagcaggtgcagtgacgatccattgatatgtaaaatagtacgtttaaagtccgtatcaactctaattacatgacgacttagtagacttgtagatcggatcagtccttgcattagcatgcgttggcatcggatatcaccgaaagtagaaccatatcctgcacctgaagacacactcgttctcattttcgaaattctgttgacaaaactgctcatctgagatcctctacacaaagcaccaacaatggaggaatcgagcctgctctcagcaatattggatcatagagatgccttggcatctgtcgcagaatttctccgaattctggctggaatttgctggactttaaactacttcagcatgttgcgcacgtcgcgaaaagacaagattcccagcacaggtatctttcctctctgcaatgacattgggtgggaattcatatatgcctttatctacccaaccgcgagcgctcattgggaaggaggagtccgagtctggtttttggttcattgcatcgtcatcatcttcatcatcaaatatgcgcacaatgagtgggaccactttcccctcattcaacggaacctttacttcctatatggagtagtgactattggcttcgccatcggccaatattcgtttgcgcgagaggttgggcctgacttgggatttttctacgggggtgtgctgtgtcaaacgctggcaagcctggggccaattgctcagattctttctcggaatagtacccgcggtgcttccctattgacttggtaagttcaaagctagatcagctgtttgcattcgtcattgacatgataaaaggctattgagagcgattgctacttttggtggattcattaagttgactatctattacctcactggaaatgctgcaggaccttggtttgaaagcccaatgtgcaagttctatatcgggttgaccttggttcttgatttcacctatccgatctgttactatgtcattcagcgtcaggagttggccaatgctcagaaggagaaaaaggagaagagcaaataggaaaagccatcatgaagcatgatagctggatgacaagttgttctgtgaggagtacggtataatgctaggtggttcggcaaggatgaaagttgggttgcgttcaaaagtcttacatctccggtctatgtatttagcatgaaatcacatatttacgaagctcaagaagtgtcacaatacatcaataaaatcctataaaaaaaaacaagtatctgcaaggagcgaggattgcgcgcattggaacattttatagataaaaaagggacgaacccaaaaaggaaaaaggaaataggaaaaccgcacatagcaaggcatattgatcatcaagggggaaagccaacaataacttgcattgtacctatcaagtgaagcggtacacgtccctgtttcgtaacttcatttatctccgacattcttcaccgccaacaacatcattatatgtagcactagaaagatttgtctttttctaaatgcagacatggaggaaggcatggaagctcccaagttcaaagtcatcattgttggggggtctatcgctgggttgacattagcccattctttgtcccaagccaatatcgaccacgtcgttctcgaaaagagagctagcattgctccccaggaaggtgcctttattggagtctggcctaatggagcacagatactcgatcaacttggtctctaccacagtctggaaaagctcactgcaccactaagtcgcatgcatctttccttccccgacggatactcatttagcagtctcctgccaaagacaattcatgaaatgttgcttcccaatgtctctgaaacccagatatcaaacaaattctgactactcaaacgtagatttaagtaccccatcgtctcactcgaccggcaaaaggttcttgaaatattatttcagaactatccaaacaaggaaaaaatcattaccaaccagagagtatccgaagtgcggttattgggcgacagtgccagtgtggtaacagaggatggaagtgtattccaaggagacctgattgtcggcgcggatggtgtccacagccgtatacgctctgaaatgtggcgactggcagatgaactacacccaggaatgatcacaccccaagaaaggcaaagtaggcaacatcgtcctcttcggaaattgattactttggagacttcaactgactcctgaatttcttcccgttagctcttacggttgaatacgcatgtgtgttcggaatatcacgagcaatacccggactccgaagcggagagcatataaaccattacggcgacaaattctgtgtgattaccttccacggaaaggatggtcgtgtgttttggttcattatccaaaaattggaccgcgtttacacctatcctaacgctcctcggtattctcctaatgatgcagcggagctgtgtgacaagattcaagacgtgatcatatggcgggatatcaccgtaggggacctctggaagaccaagctggtatcgtcaatgacggcactcgaggaggggctttttgaaacgtggagcttgaatcgaatagtcatccttggggatagcgtacacaaggtgagatctgccagctatcctggatgaactggatttccaatgatctaacaatgtttcctcttcgccagatgacacccaatatcggacaaggcgcaaacacagctattgaagatgttgccgtccttgcatctctgataaatcgggtagttcacgcagatgccttgcacaaaccatcagaaagctgcatcgagacaatgctccaaaaatacaagactctccgatacgaacgtgcgaaaagcacatacgaacgctcgagatttggcgctcgattccatactcgagacaactggcttaaggctctggtgggccgatatgtgttccaatacgttggtggcctcatagagaaccggacatccaagactctggcaggggggaacgttattgattttcttccgcggccgcacaggcttgagactgggtgtgtgacacgtcttcccaaaggccaaggaaggcctcagcagcagtggacgctactctgggtttcctctctggtcttattcttgtttttaccttggcttagatcatatctgccttcggccaccttctggtgaatacttctcagcagaaaacatttttgcagatctttgtgaaggaacttgtgtatttgtgtttcatatgtgacagtgtcagtacaaagataattcaagtatcgggtgtcgatcatcaacccgatgagattattcgctttcgaattattctaaaaatactagtgggcctgactagtatcattatcataaattgatcgacgaaggcaaaggcgcaaggcaggctagctgaacaccacataattacacaagggggtgtgcatataaatctagttttataaatatagtatggaataatcgagctaatgcagtagatccatgcatctgtaaccagccaacaaaagctcgctcaaatggaataagaattagctggccatgcaatcagtggagccaaagagggcccaaggaatgatctcgatggcgaaagggatgctcttgttgttagacttttacagatgtgtccttgaatactttccacttcgatttgacttatctgatacctgaagtgacctttaccgatataattcataaacttctttctctactgtcccctttatcatttaatatttggctgtcgatacgccttcactacatatctacaccattgttgcctctgcatttcgcccatttcgcacagtggttcagtattcgctgaagtcctcatccccgaattccattttcatatgccacgatgacacgagggaatgaaaaagaagaagccccaccacaggccaaaatccttggctcgtttcccactggaatagcaccctatgccgagttgatgcgtgttcatcgactgttgggcttttacctgaatacatccccttatcttgtgggtgttgccttttgcgcatccatctcacccacaaagataccaatcactgttctcttgcaccgcaccatacttctatccatctggtctattttccttcgaagtgctgggtgtgtttgggatgatcttatcgatatggacttggatagccagatatctcgaaccagaacccgaccactgccacgaggcgcagtatccccgaagaacgctttccttctcactgtgactctcttcgcctgtgggggcagtgttttgatatatcttccatggccctgcgccgtggattgccttataatcacattttttgcattattgtaccccttcggcaagcgattcaccgactatccccagatcactttggtgaacatcggatgggccattccgatggcaatgcacagtctcggattagatcctctatcccagatgaaaccaactgtgtgcatgttcctgtttattggattggtcatcatcatgattgatgtaatttattcgcgccaggatacggaggaggacttgaaggtcggcgtgaagagcatggcggtccgtttcagggagtccatcgagctcctgtcatattctctcctttatgcatccaccggattcctcgcgatggcaggattcttcactggacttggcctgtcatttttcgtggtgtctgtcggcggtcatttctgcgggttctgggttctccttaaagcgactcgggtagggaactcgtatggagttgaatcctacgccaagtccgctttcttccttgctactttgttttggttgtttggatttgtgattgaatattgcctgcgtaactagatgactttgatggttctctacttgcgaaggtaacggggagacgacagtttatccaacgtgtgtgccattgttcacctaactggtggcccaccccaagtcacgtgactgatggcctatcttatctccaccggttgggtcaacttctgtaatttggttttaagcctcaccaatacctcaccaataccaactttccaccagtcatttctcgtcaacacctctcattaaccatccagtggaatcaggaagggataacaccttaatgaaacgctaatagtatattattctatgcatccatagaatatgtagtacagtatatctgtctaataacgccttaaaaagatctaaatgtaattaagcctccggtatttatgatgcgtattctcaagaccattaagtaatcactgataagcaaccttggaagttcaaccaaccggtggagatttcacgtgactcaggtgggttaggtgaacaatggcacacagattggatcaagaactcgagacttaatacctgactagcgctatacactttcgcagtcttcatatatatcgagaagtaaattttcaattgaattttattaagatttcaagcccaacgtttggttcattcagctttcctcccgttaccgaatccaaaattcaaaacgaatctccagttagatcacagaccaggcgttgtcgatgggaatgattgccccgttaattctcttgctctgactagagatcaggaatagaagacagtcggcaatatcctcagcctcaacccccagtcctttctgcctatcagcagcatgtgcctggtgaattagagacattgttcctagtgcatccttgtcccaagtgcttgggtcagaggcctgtactataccggttggaactcctagtgtaaatcataagcttctaacacaaatttgatcttaatagcatatgttggtccacgtacccccgggacaaacggcattgcagcgaattccctcttgtttgtacctccatgcaacatttttggttgcgcccatcagcccatgtttacctggaaagtaggtctgtcactatgctgatgcatacctcgattcatatggatatactcactagctgtgtaagcaacgccggacgaagcaccactcgtagctgccttgctgccgacgttgacaatactaccactctgttgctgtcgcataataggaataacctcacgcatgagcttcactggagctgtcaaattgactgcaatgcatcgttcccacatataatctgagagactatcaacgctggaattctggtccatgataccagcaatgttgagcagaccatcgattcgtccaccaaactctttgatacaggtctctaccacctgccttggtgtcgtctcatgggtgagatcaccttgcatgaatttgtaatttggatgttcattgagtgagacaggtgctgatgagacatcaacacctagaattctcgccccttggcttagagctgctgtggctgttgccagtccaattccagaggcgctaccggtgattatcacaacctagaacgcaattagtaagaaatttggacgatgagagatgttagcagctggggcattacaatgtcttgaagcagcgacataactttggtataatgagcaacagaagaaaaagagaaatgacagtccaattcgattgggaggtaaaagtagaccctggaaacagtctttgagtgcagtctctaggtttacacccactaacctttgcagtaccttatccaggccgtgtcttcaaattatttcttggccccgcatatgacagagaaatctatgatcatcacgtgtatcctgaacatcattcacagactgactagaaatgtgactatacgaggcaaggggaccagatgcaacacgcctctataactctatgttatggtgcttatcttgcatgcaataaagccaccttctgcaacatgcggagcagtggagctctttgtgtcgatctcaagatcaacaaggaaaaagcaatacacattgtgacacaccaaaagaacaaagttactcagctcagccacatgatttaaggactgcgcgttaatgcacgttggactgcagagctccaaaaattagctcagttgatagatcgtgttttggcctcggcccctgtgggaggtattctgggccctaattactagtcgtaataatacggcaaagaccgcattgtatatttggtcaactatctatctgaccgctgttttcgatcgtgggagtctttgtggcacagttgaaggtggcatgagcaatttactacgagtttcaagcaaatcccagtatccgagaaagcttcttgaacaacagaatgacgcaggctcagaactatgtcattccaccaggctctaaagtcctcgttactggagcgaatggctacattgcctcgcacatcgtcaaggctctattagatcttggttatctggttcgaggcacggtacgcacgcctatgccatggctggcggagtatttcgagagacagtgcggtttaggacgtttcgaactcattgttgtttcggactttcagcagcccgatgcttttgatgagagcgtgaagggtgtatcgggagtcattcatgttgtatgtttctttggtactagtggttctgacaacaatatgtgttaaccaaatagatgtctaggctcaaggcttaccttctagcactgctgcagaaaccgtgaaaagcgcaacagcttatactgtgaatggagtcatcaatcttttcaaggctgcatctacacaacgcacaattcagcgagttgtcctcacttcttctatcgtagcggcaggctaccctaccggaaaagggttcaagttagatgctggtaaggcaactgtcaatagataacaaacctaggctgacagaatctatatagattcatgggatgaaagcctcgaacaggcatctaaagatggaaccactgtacccatctatcgagcatgtaagatcgaaggagagagacaagcgtggaaatgggttgagaagaaccaaccacactttgagctcaattccgttcttccatggcttacagtgagtcttatcgagaatcatatgtttatatacgacgtcaaaagttgaactaaccacggattctttcgaagttgggcaaaattcttcatccgaacatcggtggttcaaccatgggatatgtctctggactactcagaggagataccacgccattcaaattccttccactgcgttagtattccaaatcaaattgacagacctattattgactaaagtactttgctagcttggtttgtggatgtggaagacactgctcgtctccacgccatagctctgctcaatcctagcgtgcgctccgagcgactcttcgctactgcagctccattcacatggggggatgtcattgaaattctcaaaagaatccaacccaataatgctcgtattccagctgctcctatacaagaggaaccgacgctcggagatgtcgtcccagcagcaagagccgagaaattgcttcgtgagacttttggacagcttggctggaccccactggaagtcagcctagagagcggtatcgcaagagagtaaccgatgaggtccggtggttgaagatgatatggtcggactaatcgagtacaatggtagattattgtgatgttgtgacagttcatatctcgattgaaattcaaaacgaagggttactagatcaaaaataccatgcccattaggggatctttccctctgacttcaagacttgcgttaaaagatcggggagggctacagcgatccccggctactgtagatcgacccctctctgcctgaaatttcagtttcaccttcctaattgggcacattttctgcctcgacacctgcccacaccgccttctggccttgactccccatataatagtagcaagacagcagatacctacaagttatatgtaaaccaatagcaaaatttcatcagccgctttaccgtcaagggatgaaatcctatagtaatcaggtagaatatacgaatttttctgatcaaaatacatgttttttactatgtaaaccagaatgcatgtagtggtggcagaatatatgggggacgccgctgtggtcaaaatatataccataagtgatacctgtatgaacatgatcataggaagaggactgatactaaagctagattgatacagaaagacattgtaagagcatccgaaaggttcattcttatattaatgtgatgattatcaccaggtagaattaagatacaattaaacatcgagagtgccgatcgactaatatcgaacatgatcacgcaaaaactcataaccatcttcaacagcccgagaagctgcctggtctttttcaaaaccaggataaatgtcaaacaggtgtactgccttatccacaactcggagttgtacctcaacgcccttcgtaaccagctcctgtgatgtcctttgggcctgttccactggaatgagatcatcaagggttccgtgtatgatgaaagtgggcgtcttgtaatgcccattgcgaatctgtgccagagggctcactgcttggatttcctcaagtgtcggaacgggcaactcctctccacagtcgccatctttatgatccgaccagaagcggccgccgtgaagcaacataggcaggctttgtcctttccagttcatgtgcaacgcaattcggctgcgaggatccgccggtgacatccagcctccaagggccttttggtcgaccggaggattgtaggcagtgattggcgtctcatatatgccttcccacaggtcgtatcgcatttctggcgaggcggcattctttccgtaagggaaattgggctgggaccaaaaagagtcttcatagtctgttgggccgtagaatgcgaggatagcgttaggcggggctatgcccctctgctgagaagtccaagccaatgtcatggccagatgggcaccagtagaccagccaaccgctaccgcttgagttccgtctggttggatatcaggacgaccaagagttaaactgggcaggacatggcgagcccaacaaagagcatcgcatacatcatgcattgggccttcggtcagggaaacctctgggcagagtcggtaatcaacactgactggcaagaatcccgcattcaagagcattctgacttgcttgctgcggatgtcccggcgcgagagcataatatgcccgccgccatggataagaagagctgtttgtcgagtgtaagaaggagggttgtcacggttcgaggaaagaggactgggaacaagttcgtctacataccaattggacggggttttccaataggctgaagatcccgaggatagtaaatgtctgcagagagctccacgccatcgttcttgccgtacacaatagtctcttcgttcatgagatataaggggctcctgggggacgggggtaaaatgacagccgaggttggtgacgcagtgatcacccgaagcacattggattcttgggagtcattgtatgtccagtccacccattggaaacccgattgggaaagagtttgtttccacacgtgttcggtcgcaagggcgtgttgccgaccatcctcaaagagccaccagccctccagcagaccgaagacaagatcaaaccagaataagttgcgtgtgagctcgattaggcaaagaagcccgtctggccgtagaagcttgttgatattggaacacgattgaacgagactgcgggttgcgtgcacacagttgctggataggacgatatcatattgaccgagcatgtctggggtaggagcccgttcaatgttgaggacttggtatttcatgaagctgtaatgcttgaacttcttgcgtgccagagtcaggagccccgaggataggtccgtgaatgtgtattggaaacgaagaccaggaacggcagtcagctgacttaacaaagctttggttgtgcccccagtgccacctccaatctcgagaatcttaatttctctggtggtatccacgcggccaaggaggttgacaagatattgggctaggtggttagttgcagccttgaacattggagcgttcgtgtatacatcctccatcagtcgacgagcctctgcatcttgaaagagaagagaaagtgggtcggcggctccgcttaagcagtcactgagtcgcgagcccgttgtcctcagcagattgtgttcagatgtatgctggggatagaggcgaataatttcctcgtgcaatacatcggacgaaatggtggatacgggaaccgaagttcgcacaaagccatggtcagtagcccggatgagattggaaaactgcaagatggaataaagctggcttcgaaccttgctatgctgttgaagaaccggcacctgtgggataagatgctcagcctcaaagctctccagggagacaccgagggatttgaaagcctctaccacataagctgtgacaagggccatctgtctgggatatacggattcacaaaacccgtcccattgggtagattgactgtgcaccatacttctctgaatatcagtgaaaaggccgggtgcaatgtcaatgaggccatgtatttcttcatcggaaattggggttgggataacatgggtattcctctccgagtcaactgcttctgtagtctcgatttgcaatgacgggtgaactccatttgtgagaggagcagttgcggcatcggggaaaattgtctgcaccagcgttaggatatcggggatctcaacgaaggaggaagtgtcaatggtgaaattgaatctcttctttatctccaccaaaacctcagttcgcatcaacgaatcaacaccaatgtcttcgagattcgatgatggcaacaactcatcggaggcaattcctaatagatcacagagcatctcctggacgaccataaagtgtccactatccggggcagagtggagaggagccggaacagcggctagtgcattctgaggggtaggattgagtgcaaccttggagtcatcgcgaagagactggcctagaggcacttttttgtcgtcgggttgattgttcaatttcttgagtacccgggaaagaccggcgatggagacactggtaaatgttgccgaaagaatggtgacagcaagtttatcggtctcccgatctaggacaaacgtatcacaagtgatcttattcttgatagatcggtccacgttagagtatacagcccacgaacgcgagcaattgggatcccgggtcatgaaagcctctccaatcaatatttccccaaccccagtgcaaacaaaaacctcatcttcttttgtctccgaaagacagttgacgtggattccagcgacttgaatgaaattgtcgacgagcattggatcacatgacgcgtcctttgtccgggacgaggggaggttcacgattccagcggcctcatgatcagtcgcgaacacttgttcaacgccacgataataatcagcgtaattgacaactctgcggaaggcttgatatacggcgaatcctttaagaccgctcgactctcgtgaattggcgatggagtccactcgagaagaatcaatcaatcggttcatggagtgaagtcgaacgaagagaggtgtattctggccgaaggggtgcaagctgatctcaccggttgcatgtgtggtgactttattcttgttgggctcacgagtgaagagggagaatgaccatggggagtcacccacccgggcgcgagtaagactcaacataacatttcccctagggttgagcacaagcggagccgaaatggaaaggtctttcaggtgaggcatggctggtgatatatcgttttctgggcgaatcagtcccgccgctcgaacaataatctcaaagtagagagaggcagggcagaggttttgatcaagtactgcatggccttgtgtacactcctgataaagagggtcattcgtattaatggcaaacacacactcggtcggctgctttgtgagcagctgcacaaactctttcggggcatcagaagaaggcacagttggcttgacttcaggcaacgacgcgaaggcatttgggtcgtatccaatccagtgacgtgtttgagcaaactggtaaggtgggaggttgatccagttgtagctcttggcttgggaatcgtggaactgccagaactgtaccttcacacctctagaccaaaggttgcacgtagcctgtgaaaggcttctgtgggccagtgcgcctcccaagtcgagcgcctggtagacatgcccatttgaaaaggctgccactgtatcgataactcgtcgtaccaacgggatgatgggagatgcggatcccgcctccagccagatagcagggccttgaatcctctgggccacccgctcaacggctgtctggaagtcaactcgtctgcggctgtgatccacaatcttgcctggggtaacataagtccagtcatcatactgagaacaagcctcaatagggatagacaatggcttgtattgaagctgctgggctaccttggtcaggggaggaacaatgttatcgaccaggcgggaatggaaagcatgtgtgttcttcaatctctttgtgcgaaggatggagggggctttcgccgacagtttctcaatcatttgtagggatcgctcgtctcccgccaatatggtattacgtgggccgttgacacaagccacatccactgccacatctgccatatgctctgctgcacgattcagcaaaccctgtacctccacctctgaaccctccactaggagcatagctccacgctcagagccccacatgctgtggatcatcttggctcgctccgagacaagataaagagcatccgaaaggctcaacccgccaccgacacagagtccagtaagttgaccaaagctatggcctataattcggtccacttgcagtccggaatctatccatgactttgctgatgcatattggattgagaacaaaatgcagtgaaggctgacggtatcttcaattgggccaggttggaagatactcggaaagaggctcggaaggtcaagagtttgacaaactttttcacattccgtctaagacagcgcagatggactgttagcaaacaaaacatagagaaatcgagatatttccaaggcttaccaagtgatattgaagcagttcacactgattaaacaggtcttcggaaatggttgcttcgttcccattttgcccaccaaagcacaagacgacgggcagacgggccgccggttgtttctcaagatttgtagtctcacatgatattgactctagcttcgcaataagctcgttgggtcgatctacaggaatgctgaatgctgaaacgtagtccatgtctctgctctgcttgattgccaagttataggctgtgtcttgacaactggtcagttgtgcatcgcagacgcttgaaagcagagctttgcagtatgatctgagtgattcaacggtgttggctgctagaataacgggcacctcactagggaggggagaaactggattcgaaaggccagattttgctttgtattgtttcacaacaagagccgcgttgcttcctgcagctccgtaattggtcaccatcgccacagcagtcgaagatgaattagcagcggagggccagtggatagacttggttggaattgcgattgctgcatcgtccaatgtgggaatcttggggttcagttgaacgaaattggcctgcttcggtatctggtgtttctgcatcatcaggacagtctttagtaggccagctacacctgaagaggtttcagtgtggccgatgttatctttgatagatccgacataaagcctttcggtgcgcgcaggtcttccaaacgttttgcggatgctctcaaattcaattgggtcacctacttgtgtgccttgttatttgtattagtgaatatatctcaaattgttggtgtggcttgacaaacctgtgccatgcgcctcaacataagtgacgtcttctggacgaaccccagatgtcacgagggccttccgataaagggatatctgggaatccgagtctgggacagtgattggagagcggttggacccctgattgaccgccgacccaccaatgatggcaagaatggggtctccgttatgaattgcgtctttcaagggtcgtagaacgaccagccccgccccctctccacgacaataaccatcggcactcgcatcgaaggccttggaagcaccagtaggtgagagaaaggaggctgccgccagattttgtgtcactctggggctggtcatgacatttacgccgcccgccacggcaatagaacattcattagtttgaagtgcctgcagtttgttaccagatcaccgagtcagtcacttcttcgtcgcccgagaatatcgtggtttgaggagtagaatcgaatatggaatcttaccttgcatgcaagatgaatagacaccgcagctgaggagcatgcggtgtcaaccaccaccgatggcccagtccacccgaaatagtgactaagacggccagtacagaacgcctggagtgttcctgtagctgaaaaggcgttcgcgttgcttgatccaacattgtcagtatagtcgtccgagccgacaccaacataacaaccgacgtcgcttgggatattgaaggtgcggagaccacaatatccagctgactccatagcctcataccctacctgaaggagtagtcgttgctgggggtccatagcctccgcttctcgggccgaaattccaaagaagcgatgatcaaacacatctggattagccagatagtttccccagaatggcccttttggctcgcgaagaaggttttccatcttgaatcgctcgttgggaagtgcgttgacaccacaccgccccagctcgagcatctcccatagttgctctggagaatccgcttgggcatatcggcaccccatgccagtgatagcaattggggtcactgtcgggccgataggggccatatcaattgaaggcctcgatcgagttgtggaagatgatctgtggattccatttggcagaattgcatgttgttttgtgtctgaccacttgttgttcaagtgatctagaacgcgggttctgactagacgtggaacaaactggccagttccaatgaccacgaaggctaaatcgtcatctgtctctctcgcttgctcaaatgcggctgaaacagttatagcccactgtgatggcttggtcaggattgattctagggcagttttgtgaatggcaaatcgtttcccaatcacatggccatcgacattggacctcagtggaagaacacagggactagtccttgctaaccggaacctggcatctgtctcacaaagatctgcaaggtattgaacagctgtgacatgtctcgaatgatgaaatcttcccttcaggtcaatgattttcaccgacaatccatgacctcctagctccttggtcaaatcatccacttcatcttccgcgactgtgactgtgactgaggttgcatccgtaaagcaggagatgtaggcctatgtgttgtcgatattagattatccgttcatcacgtatgtggatcctcggcccaatatcaagtcacatgatacccatatcaacatgtgtcccccccgttgatactcccacaacctcgtaacccactattaagcagagggaagataatttgaagtagaataacatggggttattggcggggtggatatgttacgcaccgttgaagagctacccaacactcgatcgagttgttctttctcactatccgacttccatctcaaagcaacagatcgggtcggaccatgcaagatgccatccaggtcaactgctgctccaatgcaaactgccaatcggatcatagtggatgcgatgtcctcaaattcgttggaatcattcgagctagcgactgcgaccgccgctaagaagccgacacaaaacccctgggcatccacgattctgcacctgttctgggactcttctttgaatttccacacatcgattatctgtcgaataacagtgagaggcgtcatgaacacattcattgcacttttgggagcagctgtcgtcccctgaacacattcagcaagcaccgtaagttgtgtcgctccagggattgaggataaagaggaccaagcatctgtaatgggcgaccatagcgacggtagttcttgcaagacatccttgaggaatcccaacgatggattttcgtcgatgttgcggctgatgtaaaataaagtttcatcaatctcggaactctgggggccgaaaacaacacagacgggccgacccggggttttgggtggttcggccatggcaagttgaatatgtaaagcaagattattgtgaggaataagacaaagcgaagagaggcagatactcccaagttggtacctgatgttgaacaggtttcagtgtcaagaaggaaccttgtccatcgaggcacatcaaggttataatggaaaaccgagggtttagaaaaacaaataccgatacgacctgcatacaatatctgagccaaaagcatgtacggactcaccatagatgatagataacccgatatagcagtgtctctcccttgctgtttgactctaaagctgaagacacagcgattctgcacgcaatatccacccagctgcgggatcttcaatggatcagcaccttatggcgaatataccgatatccagggctcaccttctcgggggtggctggctgatgaagatagactatgggacggaacccccgacaaacttctgaggcatcagacttttttaactacactcaataaatatattacatacatatgtacggagtatgtatggtacgcttaagttgtcgtttcattctttggagtggtatcaattggtattctctcgaattctagttcgccctgccgtacggagtacgtactccgtacggtatttcgctgatttgttgatttgtttaaggttttcttttcggatgtttaatttatttctaatttatattttaatacgagtcaattatttcatgctaggcacatcggaatgtgacattggcatcttgcattcatgaatgtttatttatttcctaggttagataatgcttagtctacacccgtgccagggaagaaagagtccgtggggatagcatagtccttgctttatcgtgctaaatatatatcttgcttggctctgactctatatggagtaatccgtaggctgaaagtgattagtttgttgtctcatttttattatggctcaaataattgcttgccctaaagcatacatagctatggcagctttgggaatcgattagttccaaatttgaatcatcaatatatgttgggttgagtacaggtttggcttactatggagtatcttctttatgcttccccattcaccgagccttcaatactctgcaatcatagacaagcattgggggaatgtcacccaagttaaagaatttactagtcatgctagtgccgtcattggtcgaactgttatagctcagacgcaaggcatacggaataaaaataattggaagatgatcagacagagggtaatttcccagtacaaaaatttcacaattagttaggcaattgcaccccatacagggatactcttttgaaacattatccaagttttcatccgaatccagttgtcagccacatcacgcatggctccagaagaaggcgaccaggcgatgagccacgaagacaaagctgcgtgttcgtctctgaacatgacaagctccacagagttattcgacggagcaccatcaagtgagaatgagcggcttcgcattcggcaggctgcagaggacgcaatgcaccatggatctcccaaaatcgaccctcagatctggaccgacgtgacttctcacctcagcggttctaccacgatagatgcccgccaacgggacattttttttgagaatttgactgtccatggaaaaggatcctcgctacaaatccaaaaaactgttctgtccgcccttctataccccattgcgtgccctgtcaaacgactcatgagcattgttggtaacaaaaaaccccacaatgatcgaagaacaatattacatggattcaacgggattttaaacagcggcgaattgttgctggtgctcggtcgtccgggtagtgggtgctcaacgttcttgaaatcactatgtggctaccttgaaggcttagatctcgacccagtcagtgagatccagtataggggagtaccattcagagtgatgattgaaaagtaccggggggatttagtgtacaaccaagaggcggatcaccactttccgaacttgacagttggtcaaacacttgagtttgcagcgcatgcacgagcaccgcataatcaagtaggcaattcgagtcgagaccagtatgtcaaatccgtggtgaaagtggttatggatacatttggtctttcccacacatacgacacaaatgttggcaacgactttgttccaggagtcagtggaggggaaagaaagagggtcaggtaagctcattctgttcggcttggagcaagaggggagaaggaaagggtatgagaactgatacaatagttggtatgaacagtattgcggaaacggttttgtcacggacttcgattgcggcctgggataacagcacacgtgggcttgatgcagccactgctgtcgactttgttcggtcccttcgtacctcagccaaactagcgggatcttgtcatgcagtcgccgtataccaagcctcggaaggtctttacaataccttcgacaaagtcattcttctatatgaagggcgagaaatatatttcggctctcgtcaaggggctgttgcatactttgagacgatgggatggaaacgaccaccacaacaagtgagtgcggatttcctcacagctatcaccaacccaggcgagcgacaaccacaagttggcatggaaaatgcagtcccccgcaccccagtagagttcgaaagttactggaagaacagcccggagcatgcagagctggagacatcaatgcgacaatacaagatgaagacccctcttgatagctcggaggagatcaaattggatgaaattaagcgccttgagcaatcaaatcatgctcgaatatctagtccctatcttctctcggtgcctatgcaaatcagactatgcattgtgagagcttggcaacgcactcgcaatgatatcccggccttgattgctacggcagtggcgcagacggtggtatccctgatcattgggtctcttttttacaatataccagagaataccgctgggctcggccagagggcatcggtcctttttctcgctgttttgacaaatgctttgatatccttgttggagatcaccactctatatagccaaagattgatcgtggagaaacaagctgcctatgcctttgtgcaccctttcacggaagccattgcagaagttattgtggatttccctatcaaacttttccgatgcctcttatctgctatcatcgtatattttcttgcaaatctccggagagaggcctctcatttctttatctacattatgttccagctcacagcagttatgacaatggccacgatatttcgcactttggctaccgttaccaggactatcggacaagctatggctttggctggagtcgtgattatctgcattgccgtgtacactgggtttaccgttcctcagttcgatatgccgccatggtttggatggatccgatggctcaatccgatattttacactttcgaaggcattgtctccaatgagttccacggtcgccattttgagtgtgtggaatatattccaagcttaagtttcgagcagggactatcattcacctgctcatatgtgggatccattgcgggggagcggtatgtctctggggatgcatatattgcaggcaattacgattactcctacgatcatgtgtggaggaattatggcatcttggttgcttttcttgtcttcttctatgtgctttacttttggctcacggagttgatcccaggaaccacaccggcccacgaagtcttgatctttcgccatgggggtgtgctccaaaggttgattcgaggtgatctggaacgcggagagtctatacgtttgcaggaggtaaaatcattggcctctgaggtccattcatcaaaagcagaacaaaagaataccttcagctggaaaggactctcttacgacattccagtcaaaggtggtgaaaaacggcttctggatgatgttagtggttgggtcaaacctggatcactcacggcactcatggtatgcattatttccctcttctgaatccatgacttccacctcacaggcattgacatgaatatagggcgtttcgggtgctgggaaaacaacacttatgaacgttttagcgcggcgtatgactatcggagttgttacaggagatatgtttgtcaacggccgcgaacttgatgctagctttgcccgaaatattggctatgtccagcagcaagatcttcatgtggagacgtgtaccatccgtgaggcccttcgattcagcgcagcactacgccaaccccaatctgtgtcaatggaggaaaaatataattttgttgaggaggtgattcagttgctgggaatgcagaatttcgcagaagcagttattggaagtcccggtgatggcttaaacatggaacaaaggaaactgctcagcattggagttgagcttgctgccaagcctcaactattgatctttcttgacgagcctaccagtggtttggattcacgaagttcgtgggctatctgcgcgttcatgaggaaacttgcggaccatggccagcctgtcctcgccacaatccaccaaccaagtgccgttttattcgagcaatttgatcgtttgctgtttcttgccaaaggcggaagaactgtttattttggagatatcggtaaacaggctcggacggttctagaatatctcgaggataaaggagctcgtcactgtggcccaactgaaaatgtgagttcttcggctcctgacatacttgaaatttgctgatgccatctcttctagcccgctgaatacatgctcgaggtcattggagggggcacccaagggcagtctacgtccatcgactgggttcaggcatggaaaaggagcactgaatacaacaaacttcttggggagctcgacattctcgcctcatcaccatccaacggtgtgtctgctgacccctacatggtcggcgaatttgcaatgcctcttttagttcaattctaccatgtcatgaaacgcgaccttcaacaatattatcgccaacccgaatatattttggctaagtttggcgcgggtgttttttgcggtgtttttatcggcttctccttctggaagtctgataattcaagccaaggctttcagaacgttctgttcagtttgttcctcttgtgcacaatattctccacgctcgtcaaccagtatgcctttgccccaagcttgatgctaacatctgacgatactgactgcaagcagaatcatgccgaagtttctctctcgacgaacgctatatgagctacgagagagaccagctagaacttactcatggaaggtgtttattctgtgtcagatcctcgttgaactaccgtggcaaaccttgttggggatatgtacctgggcctcattttacttttcggtttacggcagcggccaaagctcccagcggcaggggctagttcttctgttcaccgtacagttcttcatatttgcatcaacctttgcccaacttgtagttgctgcagtccccagtgtggttctagggagcatgctggctacattcacatttctcctgtgcctcttgttcaacggcatcatgcagccacctagcgcattgccgcggttctggatttttatgaatcgtgtttcgcctctcacctattacgtgggtggcatcagtgccactgcattgcatggtcgtccgatccactgctctaatcgagagctgagagtctttgacccaccacaggggcagaattgcggtcaatatctggcggaatatctcaaaacagcacaaggaacgctctccaacccgctttctaccgatcagtgtcaatattgcccacttcgggtagcagatcagtatcttgctgcccgggatatctcctgggatgaccgatggagaaactttggaattttctgggtgtatatcatcttcaacgtcattggtgctgttttactctattatctgtttcgagttctaccctatataaggaggaaccgcacccagaaatctcgaaactgaccttctgatatcggtactccactttcctcttcaccactcttctcacccaactttcatttgttttcatttttctctcgatccttttgtcgtttttctattttctcttataatatctttgtgtgaaaattccagtttaatgccgtctcacttggatgtttgttcagttaggaagtcaagggtgccgtacttcttggcacggggacgacgggagttacgtaatgggcggataaaccaataatccgcctcgctgtagctactggatgagcagtgcgtaaacaagaagcgcctggtatagataccgaataagaagacacttcgtttatacgaaggcgacggaaaatcgtcgcagcgcataacaaaaaccagtatctctgtttaaggcccggcgggggccatatcccagtctgaaattgttcatcgcatatttacatgtatcgggacattcaggttttctgtattttcaattcccagagataccaaatacaagatgtacccacacatgtatttaatcgggacgggacgatcctttcttggcgttttggtatcccggtacattctatacatacgcgaactgatgcagattacaattattcaactgtctctatcttgcaggatatgcaaggcttgatcgtcagtatcctccacaaatatgtctataggtagtcgctattggatgtgactgtgatactagtgacgttacttcagcattacatcggcagctatcgttacaaatggaggtaaatactagaggcgggatgggatgcaaggagagattaggttaaaataattcttaaaattgtaatgcttatctggtatacaggtaaaacggaatcagtcactgcctatctcatgcaatggagtcctgtgcgatctgccaccgaaccacagcgccagcctctctctgcaagggctaacagtgcattgtgacacatatttcgttagtatgctaagcggaaaatatttctatgttgtagagtatgcgctcatgttgggggagctgacatacagctactggcccaagcctgcgtctgcaatgcgcaatgcgcaatgttttactcgttaccaagctagggttatgaacccgcattatattttacaaccttttcatatatacaatctccgagtgtatcatgagtaggtagcatggttatcagtcttctgtgcatttaaatttatgaccaaagctagttcttctcccattccaagtgttctttcacaatggctgtcgacaagttaccattattggccaagttggaacctgtgagcctgatcggcttggtccttctatcggggctattttttttattgacagcaacacgaaagtccgacctccctcttgtgaacggaaagcgaccctttgagtttggaattgccaaagcccgccaacgatatctgaagaacgcccatggcctaattacggctggtctagagaaggtatgtgattcaattctcatctgggtacataattggggttactaatgcgtaggtctaggctggtgcatttcggatcgtgacagaaaatggcactagaactatcttgtcgcctaaatatgctgatgatattcgaagccaccgtgatctaagcttgagtgctgctttagttaaggaacatcacgtcaatatcgcagggttcgacgcagtcaaggtcactgtgacatctgatatcattcaagacactgtccgaacgaagctcactcagaatctctgtacgacatggaaattcttcattggcaataagagttgctaatacaaacagtgaatattacggagcccatgtcagaggaagctactattttgttgaaggcacagtggacggacagtaccggtaaatgcttctggatatgatatcaatcagacacaactgacttatttcattagagtggcatgatgttgcgctcagacccaagactctcggcatagtcgcccagctatcctctagagtatttttgggtgacaaagtttgccgtaatcccgactggctacgtctcactgtcaactacactgttgactctttgatggctgccgctgaacttcgactctggcctgagatgttgcgcccaatcgcggctaggtttttacctaaatgcaagaagattcgcaagcagcttgaggaggcccgcaacatcattcaacctgttattgacgagcgccgactggcccagcaggcggcaattaagcaggggaagccccaggagcgctaccatgatgcgatccagtggctcgcagagaataccaaagaccgcactttcgaacctgccgcaatgcaattggcgctctcaactgcagctatccacacaacgactgacctgcttacgcagactatccttgatctttgtggacgagaagaacttgtccaagaactgcgggaagagattatttccgtgttcaaggatggcagttgggataagaccacaatgtacaagctcaaactgatggacagtgtgatcaaggagtctcagcgagtcaagcccatggcgatcggtaaggaactattcatctcattttaaaacagcccaggctaaccaacgatggtgaatagctaaaatggcacgttgcgccgaggaggatgtcaagctttccgacgggactattatcccgaggggtgagataattcttgtttcctgcagtaaaatgtgggacgcgaatgtgtaccccgatcccaacacttttgatccccatcgattcctgaagctacgccaacagggctcagaccaagagagctttgctcaactggtttctccctcccccgagcatatgggattcggctttggaaaacacgcttgccctggaagattcttcgctgccgccgagctcaaagtcgctttatgtcatatcatcatgaagtacgactttaaggtggcagagggatgcaatccacaggtgttgaaatctggcatgagacttgcggcggacccatttgccagaattgctattagaagaaggcaagaagagatctctttctgagctcttcccaatttccagctctggccgtagttggctacgagttccggtcttttgacacttgatctagcccattattcaacatgcatgtgtattttttcctgcaaactccatgtttcttactttatcaacggagccaaagtccacaaataatagactgaataacagaataaatctaaattaccagattgtactttgcatgaccggaccttgtggagatggtgagtgaataatagcttttctcggagattaaacacaattttcaggatctgctttagtattttaatcataaatactttattcaggggatatagatgaaaatgatatatatcaagttacaaacatagatggagctgccagccagtggctgacaaatacgacatgctggttgttcttatccagtccgtctacatatatcccatagttactagtctgccatttagcatagcatattaatcacctatcaatctcctcctacctatttacggactatgaaataggctgaactaccggacctgtgtgctaggggttacgaatcttggattgagaaagacgagctcgtactatgggtaaatcattaaatattatcctatcgaagagctcaacggctagatgacaatgaatgagatagaagcccgaattgccgcagcctgatcaagggagcccattactcctgagcgcgcttccattctgcgtcaaggttgttgccaattgcgttaatggcctcctcctcgagctcacggtgagagagtccggtacgcttggagaccttagattccgactcttcacgcgacatttccactatgatcgaacattgtcagtcatctatctagtatctaagaatgtgaggaagcataccgtgtaaataaacagcggctttcttgccagtgtacattgcatgcgggacattggtgctgccatcgctgttcgcatcgcctatggcaaagacaccagactcgctggtacgcatcgcgctagtaacattgatcttattatcaaccaaggtcaggtgcatcttggctggaagtgccgaagtctggacagttgggaagttgacaatcaatgcattccgctcgacaggctcgccggtagtgaagtgaaggcgaaacttgtcaaactgctcaccgtcctcgcccctgccatcgccgccatcctgcaggcgctcaatggaagagattgtgcggttgtcgatggtagtgttccaagcggcaagttgttccttccagtcttcgacctttgccgttgcccgggcttcgccatccgcggtctgcgagccgttcacaaacgcgatgatatcgctgtacaaagtgtgggtttccaacacattacccagcatatcggtgatatcaccgatcattccaaagggctggtccctgtgctcgtagccatcgcaccacggacaccagaagataccgtgaccccatcccgcctgaaggccaggagtcgcgggtagaacgtcacggacaccggtaccgagcacaattttacgggcagtgtagttcttgtctttggtggtcactgtaaaggcagagaaatccccctgtgggaaaggaacgatggaatccacggtttcattggtaaagtgagcagttggatacttctcgatctgcgcgcgagctagacctctgaaagtagcagggggtgtacctgaggggaatgagatattaggtaccaaacattgtgttggcatagaattagggcgcaatctcaccatcgtttccaatgacatcgtgcatttccctggtcggggcattgcggtactcctggctatcaatcaagagagctgttcggcggacacgagagacaccgctgagtgcactcagacccgcagggccaccgccgaccacgatgacatcgtaatcggtcttaggcacttccacagcagtggcacatgccaccaaggagacaaaagcggacgcgaatgttgctttgatgaggaccatggtgaaatatacgcgactgatgagctatcctaagaccgcacggcagcagcaggaaggccatttataggcgtcccaattttacccacaatgttttatggcccaaacatgtacacatctgtggggacactagtcgacttcgtgcatcttggattgaggtggctgaagctgaagagatcgtcgggatcaacaagatcgtcagggattcacaaagatcttgttcccttgtgtatatgatcgctgatcccaagctggctgtatggcgagaaaataatactaactggcaatttacggaaggaatgtgctgtagagaagaactgtagacctcctccgtatgcttggtagacttagggcataaccttgccaatactcgatgagcactagcgctattagctgcgggcgctagtgtatcaaccggcgatctcattggcttggcgggtccgctagttcttggcggcatcggccctgaatatggacttccctcgacttccctcggcacttgaagaagtgacccttgctttctacctttcattcgaaactctagagacaagcttgggattacatttagaatgcgttatattacagataattttgataagtagcaggtatgggaggaaatatgcctgtgctacattactttgagtggaatgaacgtgaagggaaatcagttcttgtcaggtatgtagtgttgtaacatcaaccttcgagttcaccacaataactgcgtaggtaaaatatagaggaatggatacaataatgcataattgagcttggccactacttaggcctaggccttataaatccatgtccgatttcacaaaatttaacaagcctgcaaatggaatgaggcaataaactaattttcgagtccaatatttttgctgctgggattgacgaaacatcgaataaccaacccgttggcccttgcatttcagaaggaagcagcaacaggatgtaagggtacaatgcttacaatgcttgcaggtgcattggtgggaggtcgagtaaacacagcacattggtgtacttctaattctcaattttaggatactcggaaattcacaacatatcaagctttatgaacttaacggccatccgtggatatcagtgatggcaagaagtcacgagtaggatgaatagtagaatatgcaaaatgggatatcacaaaaagcagaaatctcccggtctataagcaccgatgccaaacgcctcaatctatctaacagagtaaactagctttccacatctccagttctgacatcataattaaacatcttcctggtcgtcaagtaacaataccttcagcttctccaatttatcttcacagtgcacttccatctgcatcaccacgtcaacggcatcctttctggtgataagcagctgcgataccagccaaaaattatacccattcctatagaaccccattgacgcccattcggcacttgttattctattacgcagtgcgatccagtaatcacgccagcgggatagagcagtccggatagcaacgaggatggaatctgcaggaatagtggtgacaccgacgcttttcccgcgattcttgaagtggcccctgcatataaaagaaccgagaaatgtcatgtgggtgttaataaatgagaataaaactaaacagggagtcagccagtgcaagcaacaagaataaagctctctgagacaaggacatactatgaatcaagataaacatgtctaaagcagtgaggtccattgggttagattcgggtgcctcgtcaaacaggttcttaaatgcctccgaaagcgtaaagccgcgtgaaaagcgaaagtttgtctccgcgaacgggtgctcggagaagaaaagcaattcatcacagggcagatcgcattccatttcagtgtgtgtcaggcgacacgggtagttttgaaaaaagaagaaggcgcaatcgagcagcgaaatcatagaaatagtcctgtcgaaattagtaaggcggacatgaaaagataatactggaagataagcacctaatccgacactccttttggatccacaagtgctccaggacctggtcatcaggaaggtgacgggatttgacaagtccaattcgtcgagcaaccttaacaacctcaccgaatcgattctccattgcgcggtttcgagataaacggttccccgcccagtattggacaatggtgatgataaacccagcctgaaaattctggaaccattcccaatcactgttttcctcatcgtagcaccggccacccgagagcatggctctgatttcggtctccgccgagaatacatcattcgcaaagatgaatagctctgcaagatccagcactctcttagcgatgtatacctccctctggtcactactgtacatcgcgcccataaagactaccgcggctaagagcggcaggggaactgtctccgggtcgaaggatataggaagcattgcacagctaggctgccagtatttgaaatagagcatgatgtattttcgtatgcgcgtggtggtcagtagaaaattgagattcgcagatagttcctcctgcgctttagcatcaagcgggatctgccatgcttgtgtcaatattaaatgaattaatgtcgtcgcgaacggtcgctccggttcgaagataggtggatctccgggaaatgtagtgggatgctgccctggacggatggcggatcggtagttcagttcaccagtatgataggaatttcccgtgggcttctgtccatcaccaaaagggccgtggaaaaagtccaggaatgtatcttggaagaactgcggcgcgacagggtcgcaatcgatgaatccagagccgtattccgaccgagcggtatcgatgttatatggaagccctatgccctgcaattcctctaggccatttgtattatgataattgagactgcgtgtacgatcactgtgtgggggaagccggaagttttccgtgaagctgtcggtgccaccattaagtaagaacttgatcgatcctcggtcggatgatggctcttcacagatttcgggtttctccggtatttctgtgtgatttgcatgagtcttccattataaccgaatttatcaaggcttgttgtacctttttcaatccctagacggctcgagccagccgtccgctcgttgttgcatatcaagtttctcttctgacacgatccgcaaggacttcggccatcgcatcgcagtttcatcgaggtacactattcgagcagaataaagttagtacatatgactgggtttcataacgtctagttgcgactaaccgattgacaagcatgtcgccgtctacccctctgacctgtttctggaatttcacgatccccgcgcctggcgcagtcggtataatggacgcgcagattgtcactaattccaagtgttagattgccgagttgccattatagattgtctcggcttgtctaaccagcgcgcgaacgaatcattgcaaaatacgcaggaatagggtttctggccggagtctgtggaggttcagtatgttggatagctgcagtacggggcatacatacggcgcaaatgatggcgtttgaggtgatcaattcgcgtgaacgcacgctgacaaacgtcacagcggaagtgcttgtctgtcggcttcatggtggaccaccggggaggaggggaatatccggggtaaagaagagagaacgaggctgcacgggaaagggtgaggtatcggtattacattgatgtctggagataagaggtatcctttgagccttgataacgctaatagatacttgataatattaccggtcgagtatggtatggtcagctcctgatcttcatagcaaataattcttattctacctcatgttagcattctgatccaaatcactccgtaaatattcttatttgcatgaatagttttgatatataagatcatgaagcccaagcccgtccaatcgtggatgaaaccaaagtatcagaagagataggggtagataggtattgtttatcgtcttgacaaatgccctccatcacgtacaacataggcgctgtttgatgatagcagatgctttctgaaggcatcttttttgatgcctttttgatgttctttctgattactttcctatatggcaactagagcaaaaacaatagaaacacgacaagggcaatcttgtcatgatcgtatgtgatgctacaagggatataaaattgaacaccttttgttgagaattcataataggctaaataataaatcattctagagactagaactagccgtgagcgctaagagaaagctgctacgataggaaaggaaggacccaaagaaatatatagcaacaaccttgaatcatttacggtgatttatttcaggacacaaatacggaggagtcctccgagtcttggccttgatcatatcgtagcagtctctccacctcacaatagaacggctagccctattacagacgacctagatcaccttgtatcggattcaggaattatgcatgaaatacattaaattttgtagagtgcttggggtactttgttccgtatgatacttttgatttgagatcctcaagtcatgaatatttcgatcgtataagtcatgccccttcatgtttcagattctttcatcagtcaaagtcaaattttgaaaaaaacctgtcaggctcaagtctttgaggtgtagaaatatcttttaatggaacaaagaggcctgagtgtcccgaggggtgcgtgacagcatgcatgctagccttctaaggttgactttcctccccgttagcatggaagttctcaagaccgtcaatatttatgagagggaaacattcatatttgatagattatactgcaccttcaatagtgagatcaccctttgcatgtaggcagttgatgtacataccaacttactacccactttgagactcttcctatcaaaagactgtggagtgtgttcagcccaaatgattctcaatatatactacgtacgcatccccgtccgagaccgggctttgaatttgagtttctttgtcttctaacctagtccttctcaccctcgtccccgtcatcttctcatactgtaaaaattccgaatcactagcttccaccgtacatattgtggtgacagatcaccaacccccccccctgtacaatgtttgtgagccagctggcctggccactgatgctagctttgggcaccatgacagtggctgcagaagcatcgacggcaacttcaacctcctcctcgaccggtgtcgcgacccatacgattcaggtgggacctaagtcaaatccacatcaatttgttccaaccaacataacagccaacgtggatgacattgtcatctttgaattttacccaacaaaccattctgtcgtaaaggcagattatctcgctccttgtgtaccagcaagcggaaatgtcttttattcgggagccttcgtaaatttcaacgagaacgatggacaacttgttgggccagtgagcataataaattggaattgcatgtttaaagcagtgtggctaatatatgcaatgtagcctccgacttggtccttacgagtcaatgatactcaggtacagtatctagaccaaacatatgcccacaaccttggacggagactaacaatggctccatgtagcccacttttttctattgcactgcaatagattcatgcatcaagaatggaatggtcggagtgatcaacgcggtatgactcttggtttcttccgagcatggattcaggctgactatatcaaacctacagaacacaacccagtcatgggaaacacaacccagtcatgggaaacacaacacgaaatggccctgacgtacccttatatgctagtgccaggccagtccatgcccgcagaaggcgacggtagcagttccagcagcgacaatagctcttcttctggcggtaagcatgggcttagcacgggggctattgcaggtatttctgttgccggtgtggtcttcgtgagcatattggtggcactgttcttcgttttaggccgcaaccgcgtatactcgcagtgggtatcctcggaggatggacgcacggaaagaaccgcacgctgggcactgttcaaccacggcgagctatacaacaacgggaaaagcgaagcggggagtagtgtcccaactaacaacctagcccctgtcgatataaccgccgtctctagtcctgatcccaatgtgtgcacattgtcacctcgggcacgagttacctccggtgccggttccctacctatgcagcagggacattggagctggagtgagcctcctccgcgtgcccgtgcaagcgcgatggccacagagctagagggccatccaattatctgggaggcaccaggcagtactccggagtatcggtggtgaacaggttgaagcgagcctcgtggagtcttgtaataagcgagggttatggtgttggcttcaattatttccctttcatgcgcaaatgggtctctgcctttcttatatgttatatcaatacctgtgatttattgcttgtaatatataattccttttgaaggcgtcatttaccgtctttgtggataacgatatttaccagagtcctatctacagtttacttagtgtctgtgttttgtcgacatgactcatctgcacgtggtcggcgagtgatttctgcatgaacattatatgaaggttagatcgtgagggttgcgtctccatgtagtataggttcagtggaaggaatatcgagatgcgctaaatagacgataatcgtaataaaaccgaccataacacagttccgaccgcgttaaaggccttagagcgcgtaacatacgtatcgagttcgatcgagattacggtattattggttagccgacttcccacgcgtcgaaaatttatctcccaagtggattgcaccttcataaaccatcatgtccacaccatcaagacgttcagctttgggaatctcggggacccagaagcaagctcttcgtatttgggcacaaagtcaaaaccctcgtccatcacaatcgcaatgttctgcttggtttgaacgaacctatggacggaacctctcccaatcgaccatctcaacaatcctctctaaaaagtttgatcacctcgatgctggtccggcatctaccttaagacgtcaattggcaccgcaatggcctctcttagagacaccactttgtgagtggcttgcgagccaagaagcgggcctaatgccgccggccgatactattattgctaaagcacgcgaaatctggaatcaaattccggaataccagaccctggcacttcctcactttagtaatgggtggttgaacagattcaagaaacgatatgctgctcaacttcatgatcgccaagatggcgtgccctcacccacaccccaaaatggtcgcaaagaaacgagagcactgaaaacgctatgtggtgaattcccggaagatgatatttacaacatggatgagaccggacttttctggcgaaagcctccatttagcgcttcccccgctcagaaccaattgacaacaaacagggaaaattcccgcatctgcattatgctctgtacaaacagcactgggtcagatcggttacccctttgggtcatcggacatacgcctatgccagaggcacttcaaagggcgaatctcaaagccatggactgccattggcgatatcatcgacaggcttggctaacgcagtcgatcatgcaagaatggctgctctttttttacgacaatataggagagcgcagagttttgcttctactggataatcatccagaccaccaagcagccgtcgaggctactccgccgcctccgaatgtgcatattcaactgtttcctactcaaactcgcacctcggatgagcaacagccgatcaacttgggaatttcccagactcttaaacattactatcgcaggcaatggcttgcgtacattgtggcgggtagagaattgccccaaaacccggtccacatgatgagtctttatcacactatatcctgggccacccggagctggcgtcacgatgtcgcgaacgcaattatttacagggccttccggaggagcagtctaatggacccgcagattgagtttatcactgccccaaaatcacccgatttgacaagtctttatgggaccgccacgcgaaacaatcctgacggtcgaacggttatcagcctcgaaaactttattcaccccgtggatgaggattttgagggcggattaaacgttgtcggatttgtcgttgagggtgaacctaccttgcaggaactagatgacgccatcgtgtccatcccgccggagcaacttgtacctcctgctgtggatgcagtcattgggatacagacggccatccggtacttggtacatcagccttggatcactgcgacggaccttcagggtctcgagaggatagagagaatgatcaatcgtctcgctattgaggagcgacgacaagcacacgttggtggtttcgattgaagaagcgactaaggacggtgacagtcgtcctggcagttagtgccttcatctcgacaattaatcaacctgagctatgaaatcgtgggttttttcttactcgggtgaaagctctcagaggaaggaaagttacatctcatatatgtcctgtgcgttatgaacatattgcagagcctggtacaggccgagctccacacagttgacctttatgagtgcccaatatctgtagttaatagcagggctacgtaatttcaagcgcagcaccagaactgatgttagagaataatagctcactaccaccgggcttacccagggtctagtgtaccatctcatacattgatattccgaacaaaggacacctgattcatccaccggactccacgctcgagccttattcgagaattagaaggtaatattatcagcctgcagcattgactggctcgtttttttaaattgttggaatatattatgctgtcttaagatataatggatgtccaaagctcccgtatcaagacctaaaccgtccttgggatgcagaataccaatcaattcttgaggtttttctattttaagctcactccaatgattatatgaatatcagatttcaagttttctgagccgaaatagaagcatatcaactccagatacactgttgtgtctatttggctctttgtttattccacactttctatttaaagcaaaggaggatccgttatgttgttgattttggcctagggtcgatccgtcaatctcgcgttcttggatccgtcggcgctttttgcaggattctctcaagttcacgagtgtccaggagttcataatatcaaagatgagcaggtcaactggaaatgatccccccagggtctccatcaaggcaatcaaagcacaaatcaggcattgcatccagtcgttgaaagaccttacagtaagttatcttgggaggaaagtgtcaagcaaggcagactgctgacttttgatagcattccataatgcgaggccgcggcgatgatactcatgggttcacgatgctatggcccagaaagagcggttccgatgtcgatgtcgatgtcacgatcggttgcgtggacgccggatcctacaaacaactttcgaaggcggccaaatgtgccaaagaaaagagggtcgtaggggggatcaatgaaaatgataggtgaattgttgggagtggaatgatagggcagcccgaaggcgcacagtggtgactaagagcttgcaaagagaaattgaagacgtgacagggacatcgtcgctgtctgtcattttgaagagtaaccaagtgggagccggaccaacatggtgctttgatactttcgggttattgactagaaggttgcgaccattaggtccgtactcgccaaggaaatatgatgtgatagacattatcatttacctttcggtgcccaatgtaccagaaaaaggccaacaagagaaacctacctacatgcagtgaagtaatttggagtcggacctaatagctgagggttgatgtttggctcttcgattggtcgggttcaatcacagattggcgcgcggctgctcacaacacctgataggttggaattgtgtgacggaggatgatgtgcaggagtataccagggtgtagatagaaaacaagtgtccaacacatgaatcgccgaagggaatcgaattgaacaagaaagaaagtactattcaaaatgatatcatatataaaacaggctccgtaacggggaatcgcttttgtgtttcagatagggtccgagaccaaaaaaaaagaaaaccaaaggaaatattttactctacagcatcagtgatacagcccaggctggcgtcctggacgtttctggcatatttacccagagtaccacgcatggtaagaccggtctcagggaggtttccagcagccttgcgggcttcccacttctctttgcggtcagcaaactcagcatcggagagttcaacatcaagaaggcgcttgttggcatcgatggtgatgatgtcaccatcatttacaagaccgatgggaccaccgacggcagcctcggggacaatgtgaccgatcaagaaaccgtgagaaccaccggagaaacgaccgtcagtgatgagagcacaggagtttccaagaccatagcccatgagggcactagagggcttgagcatttctataagaatgttagcattatagtcggagatcaggtagatttgttgcacataccaggcattccagggccacccttaggaccgcagtagcgaatgacaacaacggtcttctcctccttcttgatttccccacgctccagagcggcgatgaagtcatcttcactatcgaacacccgggcctttcctgtgaaggacatgccctccttgccggtgatcttgccgacactgccaccgggggcgagagagccacggagaatctgaatgtgaccggtcttcttgatagggttggagaacgggcggatgatcttctggtcctcggggaagccagggagcttctccaggttctgggccatggtctcaccagtaacggtcataccagagccatcaataagaccctccttgaggagcagcttcaggagtgctggggtaccaccaacggcgaagagatcggccatgacgtacttgccagagggcttgagatcagccaggaagggaatgcggtcggacacagtctggaagtcatcaatggtgagcttgatgccgaccgagtcagcaatggcaatcaagtgcagcacagcgttggtagatccacccgtgatattgacaacaaccatggcgttctcaaaggcctgacgggtaagaatatcgcgagggcgaatgtcctcggcgagcagcttcttgatggcaccaccagcggcgagacactcaagatacttggcctgggagttggccgggttggaggatgaaccaggaagggtcatacccatggtctcaatagcggaagccatggtgttggcagtgtacataccaccacaagctccctcgccggggcaggcgtggcggatgacgtcaaagcgctggggctcggtgatctccttggtaaggaactgaccgtaggcttggaaagcagacacaatatcgatatcggcgttgttctgggtagcagcgcagccgggcttgatggttccaccgtaaaccatcaaactggggcggttgatacggcccatagccattagaacaccgggcatgttcttgtcacatccgggaatactgatattggcatcgtaccactgtccacccatcacggtctcaacggaatcggcaataaggtcacgactctgcaaagagtaacgcattccagaggtacccatactgattgcatcactgacaccgacagtgttgaattggaaaccaatcaagtcctgatcctggacaccttggcgaaccttgttgctcagatcgagcaaatgcatgttgcaagggttgccgttgaaccacactgacgaaattccgacctgggccttgttcatgtcctcctccttcaacccgactgcgtacagcattgcctgggaagcaccctgtgccttgggttgggtgatggtgctagagaccttgttgaggggtttatcattctggaagcgagggagagtggttgagagagaccgactaagaagagaaaagaagtcagtaaccggattgacgcgacacaattgaaccaacttacacagggttagacctggacaggctccgaagagcggcaggcacacgggcccgagtctgaggaagcatgacgaggatggatgagagtatccaaaaaccaccagatagagcgatacaatcggaagtctggagaagagagggggacaagaaataaaaagcggaagctcaagggagtgggtcggtcaatcggttcgacaatcaaatcggagagaggcgaaccctccccgccaattggatacgcgtcgttgtcagcccgttactaggggaatgcgcacatcaattgatatttattcgctatattaatgaacgagggaatgaaagaacaatataattaaaaaagaagcgacaggaatgggaagggaagaaaatggagagaggagagaagacggaggtttaagacacatgggcggcgtcgacggtgtggtgactccgagagtactactatcagatagaaaacctcatcaataaacgacaaaatatgtccagattctattctcatttactgcgcgaagagtgcctagtagcttctaggtaaaccgagtaccttctcgctcacataattcaagatcatctcccgactcacaggtgcgatacgaggcacgaaacattcgcgcatatatcgttcgacatcgtactcaaccgcatatcccataccaccatgcgccagaactgcccgctcacacgccgtgaaagcagcctctgcagccaaatacttggcactgttacacgcgacaccaatttcatggaaaggcactgatccatcgttggtatcatagagacgtgctgcgtggtaggtagccagctttgccgcctccagtttcatgaaagcatcagccaatggatgcgccacaccctggttctgaccaattggccgtccaaagacaacacggtccttagcgtactccgaggctttttcaagggcggcatagccaagaccaagtgcttcaccggccaaaagacatctctctgcattcatgccgtggaggataatcttgaagccttggttctccttgccaattaatgtatttgcaggaatcttataattatcaaagaagacctcgttggcatccacagcgcgtccacccatcttcttgatcttgcgcagatccaagccaggactatcacggtctagatcgatacaaaataaggagagaccctcgctggtcttcttaacttcttcgagaggtgtagttcgggcgagaaggatcatctttgaagccacttgtgcacaggtaatccagatcttctggccggtgaccgaatatccgtcagcggttttgctagccaaggttgtgagtttgagggtctcaaggccagtgtttggctcggtgacaccaaagcatgtgcgccatgtgccgttgataatattcgggatggttgtctctagttgttccttggtgccaaacttggccaatggctgtgtcgcatagacgttggcgtgaatggcctgagcaccagccatacctgcgccagactgtgtgatagtctgcatcatcattgtggcctcggagatacctgaacaaggtcagaaatctggatgagaataagaaatctgcgcaactgtacctagaccagcgcctccgagggattcgggcaaagcaatgccaagccatccatctttagccaatgctgcatggaattcctttggatctttttcttgttgatcacgctcctgccaatatgtatttgggattttggaacaaatatgggagatcgcttcgcggactgtaagctgctcttccgtaaagccagtcatccccataatgtcgcgccgccctgaagtggaaaatgccgcgcgaccttgagggtatttgcctattcgacatggtcctcgcaaaagtgcaggcacttgcgaccgcagcgcgcgttgaaattgtagatacattttacgttgaaccttgggaggagcttctcggctcaaaatataccccgttcgcatatagccgactagcagtcttggcgttctcggcttcgattgaaagtcgacggggtttcttttgcacatattcgtgtcctattgacatgttgctatcaaacatggccaaaattcaagtagccgagccgaattactcgaaaagacagctgcatagaagaccagcgaaactaccattgagcgacaggctggactgaagtctcatctgcgaaagctactccgtacacgattagcgaaatgctcaaggagaagtgaatatcctcaacaacacttgagaatacgatgaaatcttcagaacttaaatatattcgtgctttgagagaagttaagcacagtagcattcatcgttcagccacgtcctgttcagccactctatcgcttgcatccggactctgctctttcaacaattcgaactttcgaacgacttgaagagtagcgtaataactgaacggtaaagctatgaaccacagaccgaggttgatactcgccgttgcgatcaatgctgtcggtacagcctgcacgccaaatccgactgcaacggcagcagtttcgatcccccgaagcaatgagctgtatcgaatttgatcacctggtgagtccgacaaatttccgatacaccagtaaatataattctcaaccaagcctagactgatgcgctcaaacagatacaggccaaacccacgaccgaaggtgcgttgatcaccccagtccaacacggggtgggtgtgtcggtactcgttctggataatgaccgcccagatccatgtcgcagtgttcatgagtgcaataacgatgaacgtgacaatcgctctatgcttccgatttttcaaccaaggcaggtccaccaatgagccacctaaccaagtcgccatcgttcccacaaccgccgacatgaagcctccgagggcacgcgcgcggactgtgaaataggtcgcgagatatgtgccagggtatgcttggatccaaccgaaataccagaataatgggacaaggagcaagatcgacttactccttgccagccgccacatcgcactgagctcttcacgccagtggatgccgcggggggcctcgatacgcgttccatcatctctttgcactttctcgggatttgacaagagagggccaatgaccagtccaagacactggatggcgataaaagcgagatacgtctggtacccaacctggccgcgtttatcgacggtgtggtttatgcctaaagagaccgcaccaccaatgatgttgccgaaattgcggaacgtgaaccacgttgcaatgtagcgaccacgtttgtgatgctcagggtatcctgtggcgacagcaccctcaacgctccaaaagaaacccgcgctgatgccgcaagtgacacagccgagatacacaagccatgttgcaccagtgcgattgttcaaatacaatcccgctgcgtacaatggatatccaagtgaccccagagtcagggtccagcgaaagccgatagcgtttgtgatgaatggacccgcgaaacaggtcaatgtcatgaaggcgaatagtaaggcgttggccgcgttgaccaggtctgggctctgggatccgcccacgcccaaaccattcattgcagtccatatacctggcgcgcagaatgcacataatccgacgaccaggatttgaaaaagtgtactgtaaaagaacttgggacgaggtggtgggtgttcatcttggctttccacggtcgttgacacattggctttgtcttcggaatgtactgatgcagacatgattacagcctgggattgcagctgagtaaatcactgcaaatatgatccctgtcatacacagggcctagtaagtccattttatatgatagactcattgtatagcccgtttattggcacgatgcctagataagcacgcaaaatcataggcgcatggcataaccacaatcccgctcggcaattgacgatgaggacataagagcttgaaaggtgtcttctatcacgaatcatgtcaaggctaccccataatattccgctatcttggcagttgtgaggggtcgggctctcgactacaaatgcatggcatgcgcttggctgggtagctcaatctacgatattattttttacgtttgcaaaaaaaatggccacaactacagaagaactgcagattgagaaacttcagttggaggactctatcgtcacattcgagtccttcgacctcccagcttccaaccaacgtatcctcggacaaccacatcccaagaacacagttatcccgcttgcgctgcaacctgccaagtccgacgccaaggcaactctcgacgatttgatagagacagtcaagactctccaagaaaaagacggcatattgaccaagaagctcgcaaggcatggcacgctgctgtttcgcaatctaccaatccacaacgcagaagacttcagcaaattcgcgcacgccttcggctataaaccccatgagattattggtattgtagtcgacagaccagttcttgcgccaaatgttgcgcctgccaatgaagcgcccaaggaggtcctgatatacaaccataacgagtcgccgcaagtcccacatgcgcccgagtatatctttttctacggacatcatgcgccgtcgaaaggcggggaatcaccgatatcttcttcgttggaattattcaatcgcgcacagcaagagatccccgaattcatcgctgaactggcggaaaagggaattctaagtaaagtgacataccgagtggagaagcagtacgaaggtggatccacactgaagcaggcctttggcaaggaagtccaagatcatgacgacgaagaaacaaaacgacgcaaaatcgaggctcagatcgcgcgctatggcagagggcagcatactacgtgggactggactgatgacggtcttatcttgacgcatcggctacctgtcatccgaacacagcccggtacaaacctaccaactctctttaccgggttggcagcatattggaaacgtacacagttcgatgccgaggcgcggaaaaacgtcacacagcagctctttggagatgggacacctattcctgaaaaatatcttgcacacctggcgaagatcacggatgagattcgggttctccatcgctggcagaaaggtgatgttttggtttatgataacgtcattgcacaacatggtagagaaccgtggcaaggcgagcagtctgatcgagtgattatggccagtttattcgatggtgaaagcgtgccgggcgcttatggatttggggattgggcgcaggttgcgcaagcacttgattgaaacccattttttttatgacaacacacacttcttactcaacatacttctgcttcatcttgactttcctgtcgtaatttactatggtgtccctgtagtaagatatagcttacggggaactaagtataccaccgggcataatcctcttattgccaggtagtattttagattagttgagtacggtgaacattgtatcaagttaccggccatatactatataccaatagtgaatttgaatcgcttacaagtggtaactctatgtacagtcactccgcaaaagtctccgtcaaatgagataagcgcccacttaactctttatagtaccaattcgaatccataggttttaatagattcgacacccttatttaaactagttttagtatttagaatgaatatgcctcagaggggttcttggaaccatgcttgattttgaaaaagcattgatcaggttagcaaacgcggttgcaaacttggtaaaaaagaaaaagatacctaggaaaacgcgcatgtagggctaactgtgacggagacttttgcggtagaactggaactactagaggttatacaaagccacaaccaactgatctgcacgtcttccgtagatccgatgaacctcgctcaacctggggagaggattttccgagtttttctccctcaggaaatccaagactcctggtgtttcaatccagcaaaaacgttggcctcgctgtgtgatccagatggcggcctcgagtggactcccgaattccggcctagcaccattgtgcgatctgttcacgacagcctcaatggcatcctctggtctatcaaccaaagttcgccaccagaagaaatttgtctgatgaatctttttgtatagggcgtcgacttgggcatccagtcttgcgatttccccagaaagatcggggctgctcataatacgacgattggccttgattgccgagcttcgggggatatttgctaggatttggtccagtacctcctgggggaccttcggcccaacagcttgtcgggcttgatgtagatccttgagatcgagcagaatcttgattttcaacagagtcaaagagagaaggaaagtgatggtgtctgtgaaatccataaacctagtctctatgtccagaaagtaatcaacatcctcaagaatatcggggttctcaatgggtgttggtgctatttgcccaggagggtggtcttcagattcctcccagagataccaggacttgatgaatccataaacctcctcatcctcatcgagacgaatccagagagctgaaaccataccagccgcgtagtatttatcgggatagtagagcagcgtcagctttcacaatgcaaccgatgctctgatagaactcttcgtgtaagcatactccatgcactcctgcagattataaattgccatgaagtatttgttcttatcaggtgcgaattagctatccgtcaacaggaggggcacattggggagcgaggaatcgtgagggtgaggtcccagctgagcctcgatggcttttactgtcgcttgagtctgtcgaacatagttacagaactgattgtgctcttttcgatgttcgatctggtgatctttactgcaataagatagcaccctacaggcagtgcagattttcaggtcctgttctttatcgcagatcgcacatcccgaaggtaaagacgcctttgattgaacggtgtggaacaggaacttcggctgttggactgtgatcggagcttgcatcgtgtgtactcgaagaatctcacagccctaatggaagggaaaggggaaatggatcaataaaaaaaagcatatttgacagacagaatttggactaaaactggagtctggcagaataaattgacgcctgagttatacggccttaatcaggcagaatcaggtagaagcaggcagccctatatccaatccaaccaaacagtaattccctccagcacatcccggtacttcatgtaataagcctggcccaacatatgaagcttccgccgatcggtcttttttgatctagtacgtgggactctatcaattaggatatacaacccaggaacataatacttcggcaaggtctggcggaccgcgtcgctgagcgattgggtgagcgcatgcacagcgtgtctctcgctgatcggacggaactccatctcttcaactggaccgctttccatgttcatggggttatttgtcaagtataagaatacggcaagaatgggatcgccctggccgtcaatagctccaagaacgtcgacgacagcaaaatcaccggtggataagttccgccggaggacgtactccacttggccagcttcgacccgcgctccgtcgagtttgagcatactatctttccggcccattagctcgatcgtcccatcatggttgtaccgccctagatccccagagcgatataggcggtggtttggcctttcggggtggagccgggccatccagacgggaggcgtggagaggaagttctccgattttccagacacgtggtctagatatcccctagagagatgaggaccctcgatgaggagctcgcccacggctccgacgggcatcagctggtcaggattatcgggattgacgatccaaattgtaccggtagcagggcgaccgaccactgacccacgacccatctgaagattgcggttataggtgcagagggaggctacctcgcccataccgtattgattcactacctgtacgcggcccagccattttgccagtaccgcgtctgacactggctcgccgccaatacacatcatctccagggtggggacgcggtctggttccatatctatggcaactgagggtgttatgaacattatgttcccctccaggtcgttcatgtcattcatgagggattccatcgtcagagatttagtgggaacacagcagcatccaccggcaatgagaggcgccaaaaagtcgttgttgctgatatcaaacgtgtatgaatcgaattggaacatccggctatgtggtcccatatccatgactcggatgtaatccgtcaatgccgaagcgtagctacggtgctcctgaatgattcccttcgggcttcctgtgctgccagatgtgaagagtacaacgcaagggtcggtgggcgtgacggtcgaacaaggtactgatgtcaccagtggcaaactggaaacggaagcatcgctgacctcgaagagggtttcaatccggtcgccaaatcttcctttatatccttctgaggtgagcatgatctttatctgggtgcgctcgagaacagaggaaaggtatggtggtgggtcactgccatcaacgcagatgtacgcaccaccagccttgagaacagccagtctagccacaatggcccaggtggatttgtagaaggcacaagcgacatagatatttggtccaacgccttgtcccactagccaatgtgctaaccgagaagttaattcctcaagtcggcgatatgtcagatccccatcccaggagcgaactgcgggagcatcaggggttgtcttggcgtgctgtaaacaaagatcatgtaggagggaatcatgcgtagggccgatagctccagtgaatagggtaatctgttcacgatcttgtggcgagcataattcaaggctaccgatggtctgtgtagaagagccatcaattgacgagagagcccggttgaagctgtgcaagaggcttgtagccattggcagtccaatatcagtgtttccaacatccaatcgggcatgtaacatatcgtcggaggtatggcttatggaaagctggagaccggggaacgagtctacctccgttgactctctcgccggtgcgccgcaacagacctggaatccgtccatgcattgattagacagggtgctctccgccggttgcttctggtagaatattgtcacattgaagctggaattctcgccgacttggtctgtatggacttccttcgtgacccccatatgggataatgggactaatgcttcaatactctcgcgaaacagatctcccacggtatcatgaggatctacgtggatctggacggtcggcttcgagtagccatgagccgcctcgcctatgtagcattgaccctttggatagtcctgaccaatgtatagggttgtcgagcagcaaaatgctctgattgtagtgatccaggccaattggagtagtcgctggatatgaatatccggatcttcttcctgggcggctaggggagggaggttgagggcatcggcgaggtgcaggagtcgccaaggacgtacctttagggtgaggttgaccctatcggtagaaacatcattgactgctaccttcaatggagcagtactgagctgggaaacaattgtgggttcaaacaggacaggagccatgatgaagatgaagatgaactgtagcaagtgtggagaaacaaatcattacattctagtattagggaaactctggcctaaatgtacggcctggacagggacgaggcatgcaggagatgtctcattgtgaacatgctctcttggcactactccctttgttgaacgaagtgggcaatcaataagacctcgttattgacgccacaggcatttactgcgcgaatcatagccatcggcatgtttggagtatgcaagatgttactcccagggtgatcaattcgtgctcacggagtgtttgctctaatgtgagagcttgtatttggatatgggctgcctgagcgagctagcagaacgggcaattcgagccggggtttttgtggcacactctgcgaataaaaatccaaatggtaagggtcaaaagagacaaacctagtctggccaatcgacttcgaagatcaccgttgatctgcagtgtattttggcactcagtcaaccctggagtagggagtagtacgaggagtcagctgcacatagagtcaatgtactcactccgtaagatattaggtgagagggaattgatttagcagatctaaacttgtctcatgaattatatttaattcatcaaatcaaaattccaactagaatatgaggacctgtgaaaaggaggccgaaaatgaccacccgtgactttggagggctggcgggcgcttcaccgctcactgtcgagtactggcgccgttagccatcatcttccgtgatgttttgcgttcaacggtcgtggtccacgcccaaaatggctccctttgcagtcccaggactaagtgaaattccactgatagtaaaagatctcatcaaggaataaactccagtatcagcctccttgaacttgtaataccaccgacaacgccgtcttggtccacttgccaatcacccatttccacccgttcagcccagctttctaaaactttgtgtagatatgagctacgcgaatccacaggggcaccgacagccctgcctgcgaaacaggtgtgagagcagagtcatcactgggagtagtagggtgctagagaggagaagtggaagtctgcattgctatctaggcctcgggagtgcttttatgccacatagccgcttagtcatcttgctctggaaacccccactgcattagttagttaacagctaactagttagtcattaactagtaaaagatctcaccaaggaataaaatattctctccaatgttctccagtatcagcctctttgaacttgtcaataccaccgacaacgccgtcttggtccacttgccaatcacccatttccacccgttcagcccagctttctaaaaccttgtgtagatatgagctacgcaaatcccaaggcaaataaccactatagccaccgcaaaggtcctcctggtaaagttgatcaggccgttcggttcccggaaacctagcacgtttgaatggaacacctcgagcaaacccattgctgccgatcaacttttaaacgggatcgaagcgacatcccatccagccccaatccatgcatatttaaaaatcaggttgtgaagttgggccgataaatgggggtcaaatgcagtgaatgacatggctgagatgtaggtctttctggacctcggggttatggtgggagatgtggaaagagaggagcggcatcagcctaacaggattggttcgtaccctttacattttgccatctcgtgaagataggtaggggccagggttactttcatagcgaaaattgttgttatattcggggcattgaaggagggttatgtgcagcgtatttgggcactaaaccgaaagagacaaatctaaccggatacataattcacaggtccgctgtgtagatgaaagaattgacaagtcccaatcaatcagacattctgcataatcccagggtgaacgccctcaaggatcgacgacagctcagcccaaagtttctcacgggcttgacgcccctcttcactgcgcacaaaaggtgaaagcgcagtattctcgacatgtccatctgtcatatatgaaccgtggctttcgagtccagctgcaccgcccgccaccagcgttcgagatccaacctccgtggatcgcgccaataccattttcatcaatttgaactttaagccagcttcccgtccgagttgtgaatggcagaaaccaggattgatcatgttgatcactacctctgatccacgcacacggcccgccagttcctgcacaagtagcacctcgagtagcttcgataatgggtaccgctcgtccatcttggcttttgtttggtcactgacgaactccattggctgatcttccttccattctgggaaatccacccatgcgtgtacttcactcacaacaaaggtaagtcggggcgtgcgggatggattctttgttcgtgtggctttcagggttggcaggatgaggaggctgaggaatagagtgttgatgacattaaccgtgagagtttgctcatacccctcggcagtgctaaattgcgctgtggcaactgctgcattgagaatggctacatcgagctgggggagctttgaaatgcgctcgccaaaagcaaggaccgaggcgtgggaagccagatcgacctcccacacttcacagatgcctgggcggcctgtagatttttcaatgtcctcttttgcttcttttcctgcagtcacatttcggacgccaaggatcactcgtgctgcacctagtcgcgtgatgtgacgtgcagcttctagccctaagccgacattggcgccggtgatcagcaccgtttggtcggcgaaagactgtgttggatatgtaggagtaacgaagaattgtgagtaaaggaaagccatgatgagtggatatttcgattgaagattcttcaacgatgcaaaagggtacttaaatagcagtgggctaaataggcaacgaatggccaacgtcatggagggcttgcgatccggagattaccggggttaagctcgtccgctctaacatcctatctccatgacctcggcattcgctaaatcgatatccttatgaccgaatataggagagatcactatgtccgaacagaaaactacaactgatgaaataatgtggatttggctggacactttaggtatgaaggggtgtggtaagggtgaatgcttgcaacggatgtgaggcgagacattggtgttatgtgattgggtatgtccgcttctcttacccaacatgacttgaaagtctactctgaagaggttccctttcagaaaacatggggagcatataaacaacgacaatccaacaattccaaagtcgaaatgtctgtttatcccctagaacagaacgaatcaacagtgccctcaaggccaccagtgaagccaatgccatgctgaggataaaacaaagggatgaaacttcccagaacattggactccatattccccaaccgagcatgggtattgcaatggtccaccgcgccgcagtatcaccccagactagaggcacagttcgccgaccgcgtttagcatccccggcttgatcggacatgtcctgcaattggactgtagagaaaataattccgatgacgacaaggagccaccgacctgaccagccaagcgggtggagagggaggaaagagccgcccaatgccacttccatcgctcccgatgcgaaacaggtaaatcctagtccattgataatgttccgaatgactgggttcttgtctgcaccaccccagttattgtaccacacccctaaacatatcaaagccacagaatgtcgcgacagctcttccaatagactttggagagtcgctgatattctgcggaggaggcagagcccctgcaacatgtgggtcgtatttcgacgcggcccaagcgtttgtgattccgaaaatagtttttggtatcacaatggttttaaaatcgctgaagaggaatagccagagggtatatgagtggtaccacagcgaagtcaatgctccttggacaatcatggcacaccgacccatgacggatgagtgttgatgtttcagtcaacgttgatggtatatgttatacctctggcgtgagtcgggcttttatatctgatcaggtggaatccaaggcttgaggccgcaattttgggaatcgagggaactacagaccgtcaaatgagagactaaaacgagaaatcgagcaccgtggcctttttgatgtctcgtacaaggccctgagtttattctaaccagaatatattgccacattagggtacctagatagatattcaacaaggctgggttgtggccatactctccgatggccgagaataaagagtgttgtccaacattgtgttttgcttctctttcaccctgacttttatgatgaaagagccctgattggagctactataggactcgtcccactttgaggctcgaaatagccattgctacagttccaaaatattctgttcgatcgatcatgatcatgctagcttcaggggcagttgcaattattgcggggctactggcccaccagcttgtctttattcatggagaatggcatctaaaggggcctagggtcgttgttgttcatcttcttgccagtattctattatatgcaaccctttttgttggtcacggaagcactggagccagtttggttcggacaatatacttgacgatatgctatatctcatccctattcacaagcattgcagtataccgactcatgtttcatcgattgaaacactttccaggtccaagattcgtcacattgactaaattatggcacgtttggcaatgccgtgactcgcgtgggcatctcgtcttgcaggcttggtacgaaaagtatggggagtttgtgcgtaccggtaagatatatcgcaacccaagtaggactcctggataacgttgaaattgaattttcaggtcccgccgaacttaccatattccaccccgaagtctacgaggccatggatggccctgaaaatcgcaacacgcgttctgattggtacgaccttctatatccccggatatcctcgatctttacacgcgaccgacagcttcatcatgagcgtcgaaaaatgtgggagcaagcactgagcagaaaaggtctggtgaactcaatggcttacaaaaagtcgaagactgacacaatcattcagcattgctccagtaccatcggcgggtgctagaaaaggtacgcacactaaaaagcctagttgctttggaagaatcatgccccgttctcatcaacgatctgatgtatttcttcgcttttgactcaatggatgatttcgcctttagcgaagattttggtatgatgaggaacaagaggtggcattcatcgatagcgatgctgcgctcggcgctcacaatgttgggtccattcagtcctgcgatatggatcccgagattggggttcgcgtttattccttcgctgtggaaggtccggcactggtttcatatgctcgaattttgtgatcagtgcatggctcgacggatggaggtactggaaaccatacgagaaatctaacatctgactgacatggagctagaaaacactctccgatcacaatattgcgtcttggttcatcgaggaccatgtcaaacacggatcagatcccacgcgggcgcggtggttgagtggtgatactgcaacactagttgtagctggaaggtcagtatggttaggttatcatgaggcaatggactgataactacagcgataccaccgctccaagcctaacgcttgtcttctatttcctcgctcgctatcccatgcatgctgagaagatatacgaagagatccaaggagttgatagggagaacccagctgcattggccatgttgccacacttgacgggcactataaacgaagccatgcgattgcttccagcagtacttactttcagctctcgaataactccaccggaaggactgatgatagatggcacctttatcccaggaaacaccaaaatatgtgcaccacgctatacaatcggtcgacgtgagaacccccttgtcatctcttcaatcggaaatactaaactgagcctcaagttgagacggcatatgtcaacccccatgaatttattcccgagaggtggtacagccaaccggagcttatcaaggataaaagggcatttgctccttttggtgtcggtaagctacaactccattgactggtgcggtcagatctcccatgtgccagttgcgttgcatgggaataataagaggctcgcattctgagtctttgtttcgacagggcgtacaagctgtgttggccgtcatttagctcttgcacagatccgacttgtaactgctgccttggtgtttcattatcgaatcaaatttgcacctggtgagaataatggcgaggctgtggaacgagatatgaaggatcaattgaccgcgcagcctggtgcttgtcggcttgtgtttcaaagtcgggtataggtaaggtgaaacaagaggatgtggaggtaatatggtaaatcatggctcttcattaatctggttcgacttctttgtaatgttacgtgagaagtgttgaactagatataacatgcaaaactcctgttttcactttctactcaggccggaatccccaggcaacgtggatgtcaaatgtgacataacaaccagattgaatatccgcataagccctctgctccagctcatcaatctgccacatgtgcagcgcacctggcgaccctctagcagaatgaaggcgcgcccacgcgaacatagccctcatcccatttgcagtcaagcgggtgcgtgtatcatacacgcgatccgcagaaactgcctcagtgtggacctctactagaccagcattgcgcatctcggtagccagtcgattccagccatgcttgaagcggggtctcatggcagtcatgaacgtaaatcccattgcactcgcagcgtcagtcgtagaagtagcgcttccggggaagtggcgaacgttagtaaagtcgcactcttcccactgcatagcaccgccaggctttagcagcttagcgagattgcgcacagttctcccccattcagacgctgtcaagccggcggcaatcagtcgaatgtgcacgatatcatactgtccgtagaggttgacgggaacatccttgcgcgcgtcgagaacgtgaagagtcacgttattagggagggttctgacgggtggatagagcgatgttgatatgtcaaagccgtgtaagattgcgtcgggccagtcatgggcgaggtagcgcaggaaggctgcagtgccggtggcgatgtcagccactcgcgcatgggggtgcattttatctcgaacggacgggtgcagcaggtagccgatgtttctgtttcagcaggagtcagtaaggtttgattttgggctgatttgcaacataggacttggcggatttgcttactcggtgaggagggcgaactgctcatcgagtctacccagtcgatgttagtattaaatgttttattggtgctggtgagctcttaccgttgcgcttcggtggaatctcgctgcatattctccgcgtatggatccatgaaaagagacattttggacagcgtactttggatcaaacggaaggtcggtgtctcggaacgtacaaataaagggaggatgcaggacgctgcagcggactgatgggaagagtgagatctcgatgtgaccaggttactctaatctttgcctcagaaagactgaaatttggtcttttactgcagtcgccagggtcgcacctgctttcgcagctgaacctctgctgatccgcgcattgcaggaagttgaggtcaaggttatcacgttgtacgaaatgaactctgcggtattcatggacgttttccatatctgacatctctgtatatgctgtcctctagattcaaccctaacagattagttgaaatgatggtatctcttgagtttagaaaatgattcctctcgacacttctgctaacagcccataccgccgaacaactttgctttatattgtcaaatattgtcattaattataattctttcaaatatgatccacttgaatcatcgctctccggttctgattgtttggagtgtgatattcttcttcgttgctgcagtagctgttgtacttcgacttgcctccacacatattcgacgtcgggggttgaagattcatgattaccttattttcttctcactggtaggtttgactggggattaggctattcagccggctaaggataatgctaggtgctactgaccggctatgtggtggatatgttgattggtaagttgatccgatcgactcgctatgcagcaaaaagagctaagatcttatatcaggagctattacctctggctatggcgggcatacggctactatggctgtagtgcaacccgggagagttggttagcgcattgaaggtacctcgtctccttgaacgtttatatgaggtatcgacctggttagattttctgggcatcagaatggatgtgggcaacctcgacagtctgttttaggctcgccatactccttttatatctggagatcttcccgggcaatcagaagttcttctggagtgcaaccggggtgggatgtcttgtcttcctatactgggtatcatcggtattgaccatcgcgttgctctgtcgcccggtcgcctacaactgggatcgcaccatcccagggagctgtggggatattttgaagatacagtatgcatctgcagggttcaatatgggaattgatttgggagttgtgttgctgccgctccctattgtttggcggctgcaaatgtcgagtcgcaaaaagactggtgtcactgcttctttcgcgataggcatcctgtaagccccccacaagctcactcttattctgtttcagttgctgaccgctagtagaatggccggtatcaatctgggccgcattattcagaccaagttatgtccagctgacgacctaatctactgcctcagagactcctctatttttatcatggcagaaatgacagcaggaatcttggtggcttgtgttccaacatttgggcccttattgtttcgcaggcgaaacacacatccagcgtaaccacgcgatttgcccacaattgggtcaattagaatccgccgtcggcctgcgaaattcgattctctcctttctactctcgatcgcagtcactatgacgaagaacgagaccatacaaaggaattggagtatgtgggtgcgcccacagcacatgctgggactgggactgagaatgaagccccagagactggcattttagtaacacacgacctcgatgtgcatagtctgaatgttctgcctcgagtatctgagactttgactgtttgaggagcagcgattttctcagagtggatgttcaagatgcaagttcccttttcctaagagatctgcagacctgccgacgagaatatgctccgtaatgcatgtccgatttgtaccacccttagatgagtccgagccgtttgtactggccaatttgtgagagtaaacaaaaatacatagttgaaagataaaccaattggatcaagcttttcctcaactgggagagtatggtcgtgaatttttttcttttccatcaggcaccaacacctgggcacgatataagactgtgagaccacgtgcggggaaaactccttgactttcttttgccccaactctctctctttcacaactcaccatgccttgcaagtcctttgtggttgtgctctgccatggctcttaccatactcctgccccgtaccaagctcttgttgatgccttaactgcgaagggcatcgaggctcattgtccccaacggcccacgtgtgatctcagtcagcttaatattggcaatcctagcaaccctgattttgatcgcagggctcccccaggaggctatccactccccgcagatgatgcgacagagatcgggctgctgctagacaagttgattgcacggggaaagtcggtgctacttgcaggacactcttccggtggctgggttgctgctgaggctgcacagtctcatcgccaagctcctgtccgcctaagggaaggaaagactggtggtgtcattggaatcttctttatcggggcatttattgttccccaaggccaatcagtgaactcattctttcaacccccgggcggtaaagttgttgtgcctccgtttatgcaatttcatgtcggttgaccagtgaatgaatctttgtttgtaagtactgaccgttagtatagaaacacggtgtcaatggtcttggcaccatggtcgaccctgaagaatacctcttcaacgacctcgatagtgccactgcaaagaagtgggcatccacgttgacagcagctcctgtgatgaacagtccccttacccacaatccttatgacgtgctcccatgcgcctatgttgtgttagaaaaggaccgtacattactaaaggagtaccaagaaggaatggcggcgagtcagagcaagccgttcacgatctaccatgcaccctgtggtcactcaccacacattagttggacaaatgagctcgctgcgaagatggaggaatttggaaaccaggttctagctgaaagaagcacggcagattaagtgaatttcagaaataaatctttcttgaaaatatacaaaagaggaaacatatgagttacactcgaatcccaaggtttgacgaataggaaggtcaagatatttgtgcaacgcgcgcgtcttcgctttctaatgcctttccactttctcgtttcttcctctctccgacgttgtcaactacttccccatctctctatccatccagccatggatacccctcgctatgtgttcggcgcacaaggattcggtgtcgcctggacagttgacaatgttgaccacttgatgaaaagcctcgcggaggctggaatccatcaattcgacaccgccgccttgtatcccgctaccaatcctggtgaatctgaggagctactgggtaaaaagaagccagagaatgcagtcatcgacacaaagattctcttcataggcgatgactctttgtccttcaacaacatgggagcctcgatcgaagccagtttggagcgactgcagatcaagcaggtgggtaaaaggcgcccacttactttgtgtgcaatgctaatacggctattactagattcacaccatctacgctcatgccccagaccgcaagaccccgatcccgcttcaggctgcttacttcgaccattactatcgtaagggctactttcagagattgggtctttcgaactacagtccgtccgcaatccgtgcctggatggaaatcgcggtagaggaaaacttcattatgccttccgtctatcaaggccagtacaacgtgttctgccgaggctacgaggatgaactttttcccgtacttcgcgagttcggcattgccttcgaagcaacctcgccgttggcaggtggattcctcaccgggaagctttcctattgcccttcacccgaagagttagagggtacccgcttcgaggtcggtgagggcaacatgctcggtgcagtctaccgtatgtggtatgaccagcccgtctatcaccaagcgatgcgacgattggacaagattggtaaacggctaggaaccaccggggcccaatgcgccctgcgttggttgcttttccactccaacctgaaggatcccgaccgaattgtcatcggaccaagcaccttgaaccagcttcaagactatgtggacgcccagaaggccggaccacttccagctgacgcagcggccgagatcaatgcgctttggccggcactcaaggaagttgcggcgacgatcatcgagaagggatggtggtctctgtgattgatatgttgaacttgagggggataacgaccaaatttccaatggatcacgaggtattcatacgccgccaggctggtctacaaacatcttatcaagttaagccttatgctcacagacacatacaaactacatgcaatggtatctcctagtttttcacacgtattgctcctatgatatcattccctctggtaatttaagacctacacaatcgcccattctcacccaatctccaagcctcactacccacagccttaaaagcgtagaacctattgtgaggatcatactttctcttaatctctagtaaactgtcatagttgtctccataaaatgcatgttgccaatccctttggtttgaatctgcttcgttcaaatatgcaccacttccaggtgtcaggtcttctagcggtggcataaaaatatcggtcatgagctggtgacgagcgacattgctctcccagtcagtgtagtcgaacagcctggattgagattaacaaagacttgccctaaccctgaaagggaatgggaatgaattgcatacgctccaattacgacattcatcaacgcgtctcgccaggctgggttgacactgttgttgggatatgcaactcgagatgagttgaccataactcctgaaatgagaaccccggcgtttctttcgacaacattacggaatgtgttgacaagctcgcccaggttctgctcgactacagatcttggaatcaggcggccaccagcaagttgatcagttatgttgtctggtaggctcatcatctggtaggcgtcgtaatatgtcgggaaaccgttcacatagtatgctgttcatgctctgtcagtgttcgctccaactctgtatcgccttgtacttactgtgctgtatgttcttttgttcgaggaatgaaatcaaaggtctaaaaagggaattgaaaattgtcgctgatctgcccggaatggtagtaggcgtcattgacaatgtagtgttcattaaccaccaaacacctgcacccccagcatccccgaccgagggaagaatcgaaataaacatggcgacggctgcaaagaatgtatctcgcgatacacccttgtcggagaatgaaaggttacctgacgctgtcggcagttcagggtaggccttgctcgtcatcgacacaacaacaccattcgtccctccacctccgccggacagtgcccagtagagatccgaatagtgtgttggtgatgcggtcactagcttcccatttgcaagaacaacctcccattccaggacttgatccgcggcgagtcccacatgggacaccaattggccatggccgccgccttgcgaatatcctccagccagcccaacggttggacagttcccgccgacgataacaagcccagctttataagtggcgtcgctggcttcgaaggattggaccccggctcccatcttcacggctttaccggaatattgtgacgagacgtaatctgcgatggaaatatccttcatgtgatgcatccagatcgccagtcctccagctccagtggacttcccaagtaggtcatgtcctgtattacggatgacaaggcggatgttgtgacgagcagcaaaataaattgtcctctggacatgtctggacatgtgcgggatctgtcacgttcacggcgtactcaacgtagttcccgatcgcgcaaggtgaagattttgacgagaagggattgcagcttaatttcgtgaatctggacgccataattgacgaggaactttcgtaatgcgttgctgggaatccccaattggactggatttgagcgcattgcgattggttgtacggggtgaacgaggcgatgtgacagacgctggcgattgggactgtcataattaacttgttgtccactgttctgttgaatcgtgttcatcgatgatcctcaggccagcagggatcgtgtggcatgcaacgacaggcaagggaacttgtgtgattcccgattgaaagaccacaagccacagttgcggcacgaaggacagctaggcagagccgcatacatgcaagagaagggttggccattgtgataatcggacttcggctaacttaatgtcactcgagtagcagattatatacaaagacatattctgcaaagcggaaaccagcctgtacgcactacatgtaagactttgatatacaccgaaaatatcacatcacttcggccctgcataggtagctgtgactgcaagtctgactctgagcctcgtgaggtagggcattagttgaaattccacggaacaaaacacttgctcatcttatatatgtcttgtctaagattggtgtaaccaggtatgtgcggagagagtgctaattttatcacgataaactcgaaaaattgggggctggcttattatctttgcatagtcaagtttactgcagcctcttgcgacctataccagcctttgcattgagttgtttgtcgatgaagtaaagggctatagatagatcagctcacttcggtgaaacacaagagataataagcgcttagtacagctattgaacgtagaaggactctattgaactgacactagaatctgaccatagaatgaatgtgaatgtgagatgagtgaaaggctcagggatgaatcctaatacgaaagatactattcatgttcgttgaccagggatatatatcactgtacgaagtacacgagcttgcaaaccccggatggtgcttttttttggagtgtttacacctgcgaatattaccataaaatatgtccattgcctacctttaggtcgttaactattggatgttgtagaaggctggaaaaaaaggtataccccgtgatctggcataaccacagctcgatcacgatgccaagccacgagtggccgataatcggccgcacacccgagcctaacgcacgtcacctcttctaggcgccatgggatcctcgtactctacaatatcggaggatgtcaaatctgtccgacatagaccttcagcctcccatgaagaaaaccaaatctattacccaagacactcagctgatgcggtcgagagcttcaacattctccgacaaaagttgccgtctgaactcgtcctggacattctagaattggcagagtattgggtgttatctgccaccttcagagcagacacagtgggttacgatgaaggcgactgccgtgatcgaaccccatatttgacatcggagcccatccaaggcgagcgatttcccgttcgagagatcagaatcaacatctggagccatgatcagggatggagcagctatggtgaagatcatggcacatacagaaactcttggacctggttcgatcttggtattgaacgactgccgggacgagatgatatctccaaagatgaagacctacgcctggcgacgaatgttcacgctagacgcgaaactatgcaccaccagattacgtaccggagggaccagaaattacgctggatgcaaaatcttcaagcaggtgatcggatttcgattataccacgggcgcgttttcatggctggcgcaataccgtggaaaaggcttctattgaggtttacaccagccctgttctgtgactatgtccctgcattatttcatattcgtcttgatttcaaagccattttgtatggtctactttatacataagtgaatgtgctcaactttcttcgatctttctgacatctatcgatgcgttcccgaagacagaatagcggccacttcctcataaacagaaaatacgatgccaccactcagaagtagccggcccaatcgcatggaactacccttccaaaatccccgaagcccatagtcccgaatcacgctccgggaggcttcaacaatgccagctccttcgacaccctgtgcacgtgtcttgatggtatcaaatggttgtgtagcgtacacagtaactattcctgccaaggcaccgatgccgaacgttgtgaacacatttggcttgatgcccttagccttcgtggcttctttgagcacgttatacgttcccttacgaactgcagaagtggccgattgcttcatcatcgtcgacacgagaccgcgataaagctcggtgataccatgcctttttaccagcacttgtattgcctgtatgctcgacttgaattgccgagcgccttttgcatcgtcgattctggggcgggatcggtcagctgaagctcttttaacatacaagtggataccaacaatgccgtcttgatcctctccgtcggtgttactgctagtacactctctacagcgccagcggtcattccagcgagcatcccccggctagccgagagaacgccgcgatcatctgcaagagagttgcggattgtatcgtaggatacgaaccggaccgcggcctttgctgttgttccctacaaaatgtcattaatgtgacgtaaaatgccattggagacgaataaaccgacgatgacaagagttgagcatcctgtgtacagagcaccgacaccttcctgtctcgcaacttgtacgatgagacggagtggatttgatgtccgattaggaccgtcattcgacagttgaacacgtgtttttgaatactcaaatggatactgcggccgtcagttattgaactcttgtgtaaatcaagaaaccgaccgttatggccgcttccactccaccggcaattcctccggccacgagggacacccactggggcgtgtaaagctagactaggtcagttaaagtactcaattgacgctcaactgaatgaattaccctcgtctgttgtgggccaggttctgatttatcgggcacagacatggtatgacagtgacagcttgcagcttacaccggttgaataataaggggtttggcccaatgggttggagatattctgtgggggaaaacgggatgattccccggtatgcggggacgaacggaagaagagttgccgacatattgcttgctgtcaactgtccagaatatttcttcatggtattggcaaattctatctacacataagttctgcagggacaaatagaaccccgggcttgctgtataccacttcagacgcctcgctctcgaatgcagctctcgagatagccggcacataagtgtcttcttcctgtgccttgaagcttccttgtcagggcaacgccgggatgaactcgagctcgaatccctgtatgctaggaattgtgagcggtcgcggcggacgtgatgacctttatgttaccggcatcgcatgatggcggcgattgatgtggcaggcctggcactagaggaaggaggaaggaggaaggagtaaaagttcggcaatatgtcgcaaaaacgcaacaataatgcattaccatccactctcaccgatcatacgaccaagccgcagggaccgatggaaaaaatgcatgcttcatgtcctgaaacgcagctacatcctcgttcattatcacggaaaaatcaatcgcagagccagcgtcagggtcgacggggagccaatttgatgtcatgcgggtactcccatctggcatctcgagtggtgtgagacactcttcttctattcttgagtgttgatggcgcggggagctgagactgtgcgtttgtccatgagcctggtatggagagtctaatgccgaggtcgcgaaacccggcccgaaatcgaattgcatgtattgggaatcttcgtagtcgaattcaccttcccacccgcttgatgaagcatggcttggttccggggacgcgtgaggatctgagtttggagatccagggaagaaggcgagggtctttggggagggagtcatgaagagcgctctttgtgttgcgagctgtaaatctggacggggatggatacgggggtttggggtggtttgggatgattggcgtgagaaactagtatgattgttagctagctagttcaagatacgcgtcttttcttcttcttttgtctcgccagcaaggcactggtagtaatttaccttttgacattgtttttcgttcctccacaatcctctctcactagaccggcgtcataccatgtttgcggatatggttggaatgcggtcgatttgaccgggtattcatccacccagcttaactgctcaatagcccgggagggatctagtccctcctgcatcgtcagaggaaagtcgctggcgataaagggatgcagaccgagctcatcgtgctgtcccacatgcaaatcaatgagactctccataggccaggaggtagtctcgtatggaaactgagcttcggtcatggtgaacgtgctttatttaccacaggttcaaatgacgatgggggcaaatatagtaggcaagacacagatcaaagagaaaagatctggttggagttggagttaaagttgaagcttgaaatagtttctatctctgtatgaccttgctaccagcgcaaagagaaaagcaaagaatgattactcgcaaaaccgggggcatcctgtacctatttaaaccaaaagaaaatcgaattcaacatcaaatcacggagctggggagctgtggaaatgcggagttgcggagaatctggggcagctccagcggcaaatatattcctagagaccgcatgatcccatgagatccttcaattaaccgatttccccggattttacggtcaaggccgtgcattcgtgggaggttgttgtccaatcggtcaattctggtacctcggcatcgagaatttaatcgaaaccccgccgttgagcggataaattgaagaggctcgaggcttcaggaacccaaataagaacggggaatgacatcgccttgtttcgtacttactatgtaggtataaccggtttaatatagggttcggaggaagatattgtccacaccacattggaagaatggaccgagataccctcaacggtaataaattatatacctccagatttatccgcccttaattgttacatagaaagaagcttccaccgaggaaacgccagatatccaaaaacgccactccagaactatacaatgcgtagaaaagtagtatccagtcaaccccaagattgcgtacaacatagatcgaccgtggggaaaggggttcccactcctccgctcaggtaggcaaacccacatcgggacgcgtgctttatcctgcagggcgcagggatcgacaggaacagagaaatcctagccgggcggcttgtggggtatttacagggccaggccagtcccttttcgcgtccagcgataaagcgcgagaactgcttttcggcgatgtcgaatttcactcgggttaacaggtcgacctcgagcctgggcaaccgcagagcgcatcacttgccggaagctgcgttggtactccgtgttgagggtcaccacacaagattctgtcgctcggatcatggtctcgcacgcgttgagtatgccctcgcctgcttccttttggaggcgctctacgataagtagcaggaggaaactaccctgcagcagctggatgccgaagaagtaaggcatgaaactaacgtcggggtcgaagcggaggatttgttggacggaatcggccgcttccagtgcgtgtgagatggtcgacgcaaaagccggggaggatgtccagaaatctttatcttctatcaatgagacaggatcccactttccgacgagcaggatgtggaggacgtgtgtaaggtaggaggaataggcaatcacggtctgggtatgccaagaataggcctcggacaattgcggatcgacaggttctggtttgttggtgtaagcagtcgttgacgaggccgctgggtctgccgccgccgccgcgaaggttgtgagactagctttgtatatctcaagctggcgcagcacttccgatacgtgaacctcccacgcttcctttccttgaagtctgacaccgagagttgggtggtttcgtgcctggtttagatcgatcagttcgccagtgatcgtcatgagtgggaggaaaaagccaagaatggagtggtcgtggcaaataaagttggggaaaatgcgacgtttattttggtcgcccgaccggaggcattggggcccatcgggacgaggactattgctgtgaatgattcctgcttgccaggagctttcatccagtggaagcaacaggtcctcgctctcggcatccagtagggctagcggacgattatagcataatgcaagatggcggtccatgatatatagcagccaccaggttctgcgccgctcctcacgatgctcttctgtaataggaacattatgtaaatcatgttttctgtcacatacacaattcagatttgggcgtgaaggattagagtagtccaagcccagcccacctggggaaccaggccatccacctagaccgtagccgaaggacggacttgaaccatcgctcatgctgtcgatattgggtgttatttccatctcttgattcaatttaagttctcgagctagtgtaaaggccgcatgccacctagtttggagttagtggagtggacaaaagataagagcaggtgtacaacgaaccatctcatacttgctgccttctgttcactagatgagataatcgaggccacatgaatataggtaatgacatcgtctaaagatccagcggggcctaccagccctttatcatcaccgactccttcgaatgggtggtgagtccctgcagagaagtcgtgggtggttgtgttttcggcgggtgatgaatctttgtctttgaatgagacatgtatcaaaggccgcagtaagcgaataatcaacgcacagagaaattggcatatctttctccgttgtaatggtgagatggataaagagaaagctcgatcatccacagcagctacccagagcatacttgccagcaaggcaggactagtgggcctggggcggtcgacacttagaaaagacgtctttcgcaggacatagcaatgaatatgatgacacacaggatgcatatgggttgagaaagcactagtaaagtagagttcaagcagatcgcacaccagtcgacgcgggaggtgcgattcgagaaaaggcatgagaggttccaaaacagggtacttcaatggcgaccgggagattgatgaccgtcttcgtcttgaagggttcgtccccgacacagacggtaggggaggggcgtgctgggccggctggtggccagcgaaatcaaccggattccaaatatccatcaaccggggcaaaggcgcgtcgctgccacccgttcctgcaagcatatcgtacgagtctggcgacagatgtgccgctgaaagccattcctctgtgacattcgcggcaggccctgtccgctgcggctgtggacaatctggcatagaccgagggtcgtcgacaccggcgctgatctcatttgttgcaggcgatggctgatgaaaggtcgatgtgggagaattgttttcaattggcgacagcacctgctgcgactgcgactgcgacttcgactcccgcttgtgttccccgtcggcctgcttcccctcggcgcggtcctgggttacctcgtcctcggcattcgtatttccatttgtcggcttcgatctcgcaatacgtcctcgtttccggcgctcgcgggtaaattgacagtgtatatcaccgcgaagacacctcgagcaggggaaagcacgatcgcatcgtacgcggcgagtatggcatgagtcgcaggcgactctgtttcggcgccatcgtcgcttgccattcggtagctcaacctcgaccgagtcaggggccggagacggctgatcaccctgggactccatttcgggacgtcattggcgaggttgagtgttgaaaaaaaaaaggaagccgaagagaaaagaagaatgttgcggggaaaaggcatcgggcaattggacttggcaatttctccaactcatttagttctacggagtactccatcggaggaacgttgatcataatacgcttcattcttatttacatattcactattcacttcaccctttctggagtacactcttgaatcgcttcaacgctcgatctcgactctctgcatggtccacaatgggcttggggtagccgttcttctgcgcaatagccgcggctcccctcgcatatggttcatggatggctttaccagacacatcgcgcagctctggcacccagtggcggatatactctccctccgggtcgaagcgctcactctgccgaagaggattgaagattcggaaatatggttgcggatccacgccagtactggacccgaacccccacccgccgtgattggacgcgaagtcgccgtcgattagattctccataaagtagcgctcgccacggcgccaatcgagcattaagtccttggtaaggaacgatgagacaaccatgcgcgtgcggttgtgcatccacgcgcagtggcggagctggcgcattgctgcgtcgacgatcggaaaacctgtcttgccatcgcaccacgcttggaactgatccttatcgtactcccattcaatatcggtatgttcgggcttgaagcatttgttcatactacaggaagtctttgcattagaatgggaaacccgttggcctaggagataacttaccagatgaagggccagttcaccaggacatgtttgtagaagtcccgccaggccaactcgctgatccacgtcatgtaaccgggatcgtatcgatcgagatggcctttgttgaccctcttcgctgtcgcgacagcagtccttacgctcagcgctccgcatgcaatgtaaggactcaacaccgaagtgtgctcaccgggcaacatgctccgcaactcctcgtactttctacctttctcctcgagaaatttgtccagccgccggagggcttcatgctctccggctgggtaaagcccctcaaagcgtttctggtcttcgcccgacaaggtatgggttttaggtgcggctggcaccttgcaattgaataaatccttcaattgatggcgcgcgttgcctggatttgacccgggctcctcagagacctcgaggtaatccgggttctctttcaagaaggccaaccaggagcgataccatggagtgtaaacggaatattgtttcccttgctggctagccagcgcgcccggagtgaccacacatgtgtcatgagtgggagcgaaattaatatcattatcggcgcaaagtctaacaagcttagcttcgcgtcgcagttcatctacctcatactcgatattcgcatataggttcttcgcaccccactgttgacacaattccacaatccgtttcgggattgccttccgtttctcttgtgtttccatgtgcagagggatatccaactcccccaggtcctgttgcaatcgctcgagggtgcgcagcgtgaaatccacccgagcagggctagtcaaatgggcagtccaatcttcgggggagacgatgtaaaggccgatcaacgggatctggttttctttcgcagtttggtaggcagtgtacagtgacctattatcatgcagtcggagatcgctcttgaaccaatgtaccacggcattacccacgttgatcgactggcgcttggtggcggtttctcggcaagccctctgtagcgtttcaatagggcgttccagctcgccatcggtgtatgctcggcagcgctcattgctcatctcggccggatagaactggcgtaggactatgccgaaatcctcggtttggttcgcgttcgggtgcggttggtgcaagtctggtcggccttttttgctagcactcaagccatcatgcttttcagctgccggttcggtagctttcctcttcggtggcatagctgaaaggttgcgaacaagctcggctcgcaattgactgaacagaaacaggcgcgggattgatctagaacagcagagaggcagattctgcattactgagaataacaaggacaaggggtgctaaaaggtatcccaagtccttcgatccagatcgggatcggcttcagatctgggtgacgtcagtatccgatctgatcgcgatcgcgtccctgtctacggtctggacctgttggacgcattccttggtcggaccatgctagttctgggattccgattcatttcagttatgccacggagtagtgacctcagtccccgtttcttgccaatggccaatttgggtatacggcagatctggcgttgaccaatcccgcgaatgtgaacaggctcttgttctggtaccaattccccacaacgactgcaattaaccaggaagtacttatatttcatacttgtcatctccgagggctcatattccatgtcttccttcgttgacaaccttgtcaactacctggccaataagtacaccaaacctcaaaacaagggggatcgacagtcgagaacaaaaatccagccaccgttcaataatgcgatgatggaggcgtaacaaagggagtccatccctgttgatatgtacttctggagtcagctctaagtataccccaaacttccggtccatggcctcggaacttctcgaccagtctgctttcgtcaatttccccacaaccccggctgtcaggtgctcttgtatgatccgattgcctccattcgccgccgataccgtcaaagttctccccgccactgttcagaccctgaactttaaggtcgctgggaacaaatttaatagtttattcctatcccctaactcttcccatcttcaattcccccctatatctatatctatacctatatctcatccctccttccctaatccatctaccccagtgcacaaccagcaatgtccctcaaccgccaatggccacaaacgacgcccgcagcgttgaagactaccttattcccggcaacggcccatccgacctagctcgcacaggcgtcttcgccgccttcgccgcactagcctggtacaactccatcgagctcgtcatcctctgctttttctccttcagacgctggaagggcatctacttctggagtcttctaatctcctccggctgcattatcccgtacaccctggggtacgtccttctcttcttccggaccggcgttaccccctggctatgcgtgaccctcgtccagctgggctggtacggcatgatcaccggccagtcggtcgtgttatggtcccgcctgcatctcgtgctgcagaataggagactgctccgcggtgtgctatggatgatctgcattgacgctgtcatttttcacatcccgactacggttctcttgtacgggactgttgctcagccggcgagtcactgggcccgcgcgtataatatcatggagcgagtgcagctggtcggtttctgtgtgcaggaattgattatctctagcatctacgtctgggaaacgattaagctgcttcatctcaggcctgaaggtcgccctcatggcattctgaaccagttgctggttatcaatatcctcattcttctcttggatatctcggtcgtcgtcattgaatatgtcggctactatgctatacaggtcatgttcaaacctgtcgcttacagtatcaagttgaaacttgaatatgctattcttggtaaattgatcgcggttgctcgtggtggcggctccgatagtcaggagatgcactccagtacgcgggagatcaccgagtctagctcgtttccgtcgaatggggatcggcctgcgaaccgggagacgccgatgcgtgttcgtcgcgagtacagtccatcgtggtttgggggaggaagctctggtcattctacatctagtttatctggtgtcctgcagaatccatgacagcaggttttagctcttggcttgcttgtacctaatcacatagatgttgagaagctctatctctttacaggtgatatagcatgtctcaaatgttcatacgagaaattaattgtcgaaaatatgcgaaaatattcacaatggctccaagcgatatctcaaatatattcaacgatagtaatcagccaatccagcggtacccgcctgcagcaccaatacgctgccataaatcttattctcgggctgtaccatcgccgtaccgacaggtcccagaacccggcgggtatcatgtccaatactatcctccgaaagacccagctcaatattagaagagacactacgacgaccaacgataataatgttgttcgccttgttcgaagtgtggttaagttcttcacgcacagaaacgacagccatttgagctgcgtcggtaatggtatcattgacagctggttggtggaagacgacacgctcttgaagttcttctggaacagaatcacgcattgtttcaaaaaagaccatatcggactgagagctggacgcagggatcgcactcgagctcgaagcagatactgtagtcaccacggctgttttagtgacatcgcctcccaatcctccaatctgaataacagtcgcagtgacctgatcattctgagcgagctgcatgaccatccgaagagcgaagcggtcatcatcaccgccaaagaatggaaggacaatgtggtgggagcggctgccggttggctggcgggcgaaaattgagccctggagactcatagcgctggcggtacgtgagatcacggggcgctttgatgaggcagaggatggactgtattcaattaggatgcccacatggccggggacccgctctaatatatcagaaacgaagcttgtgtaggtgccgttggagaaacgatttgcgtcgtcgatgtctagcccattatggcggtcggccagtgttccggtctcgctccaggggagaaggagcagatctgcggtgtcctgctgcgccatgccgatgacggtgtctgcgtaagagtgctcggggacgacagatacaccagccatgagcgagagatcgtgccagtctccgaaggcgcggaaagtgttgactaccggatcccacagtgcatgctcgcccgcagcagcaaccttcatgacactggaatcacggtcggtcaattccatcagcctaacaccgtgcaccttaagtgtggtgttttcgtcctcttcttgggtaataggatcttcgacggtttcctcggtctgttttggcatctttgaggggtgaatgcgtgatgacacggatgcacgtcgctttgaactgaggagggctgctatagtacagacacccgaaagaccatcgagacgaaggtagacgaggagcttacgtactgggacggtcttcaactgatccttggcaagggcgacgctgtcgttgcggccatcatgctggatagggttgccttcccagtcgatctccccgcgtctccaccggtcgaccttgacctggtaccatcttggatacagcaaggtggttaatggagtggtaaggaatgtggtgaccaaggccatcacgacgaaaattgtaaacgtgcgagtgctcaaaatcttagcttggagaccaatgttctggggttactgaattagcatccattctcaatcggaaaactccctgcaggttgtactcactagcacgattaattccaccaaacccttgcaactcattaacacaccgatcgaaaagctttcgcgccataaaaggccacagagccgcgatgcaatggcacctccagtgactttcgcaatgaacgcgatggcgattacgccaaccacataaccccagacgattccagagtcaagaaggcccagattggtgctcagaccggacaaggtgaaataaagtggcaggaaaatgacagcgaccaaatcctcgactttctcagtgagcttgatggcaaagccgccttcgtgtgggcagatcagaccgatgacgaagcctccaaaaatggcgtgaacaccaataatctgtgtgaagaaggctgaagccagagcaataagcagagtgagggccaccactgactggctgggtcccttttggagactgcccgttttctcgaggaagcggaggaacagtgggcggaaagcgaaagtcaaaaacaacatgtaggcaacgcagactagtaacacgtacagagccgtgattccactgcccgcgttgacaagagcaacacatagtgcaagcaggatccagcccaccacatcattaccaacgccagcggacagcacgatcacaccgacccgggttgagagcagcttcagctcggtgaggatacgacacagcacggggaaggccgtgatggccatggcgataccgatgaacagcagataggtaccgaaggcaatgggcttggtaccaggatcatcgtggaactcatggtagaggccatatgaaatggcacaacccaagccgaatggcaagatcatgcccgcagcggacacgctcaaagcgacccgccaattactgaccaggaagcgaagatcggtctcgacaccgaccaagaagaggaagagtataagccccagattggcgactacattgaggctgggaatgctggcggtcgggaaaatcgcgtcggtgaatccggggatgcgacccatcaccgatgggcccagaacaattcccccgatcacctctgcgatcactcgaggctggcgaatctttgagaggggccagtgtataaggcgacatagcacgatgattatgacggcctgcttgtcagttatatttctgtttccccggatggcgacatagttacctggataataaataacaccagtggattcttggagtcataatgggttgggttgccgccttcgaggatgccaccctgcggactgactgcgttagtgctattggccgtagctgtcgtggtcacgttcgcggtcgccatactggatgatatccagcttcggcagagagaacaggcagaggagatcttttaagtcacgacgtctccccagcccaagacaaatgaaagagtcagcctacgctaagaccggggccaataagatttaaagtgccatggatccttaacggcttggcctcgctagtcccaacgtggattggtcgaaagttcgaattattcattcaatgcgggaatcacgtttctcttcttgaggggaacaaagcaaatatcactgcatgcggccgaggaatgggcagtctcgacggagtacattctttttttgctgtgcacgaacacgaccagccctgaaataagaaagagttttcataatctgcgcttttgtttaaagttttcacgtggtgatggtgacatgacagctcgggcctttggcgaggcaggtgatctaccccggattctttccccagacacaacatccacagcatcttacggtctatgcatcttggtaatgtgacatctgattctacaaggtttttctgataaaactcgtagcttgttggcatgtcctcttgaatcatatgtctttgtccatgtgatggagcacgatatacatgtactatatatagtgggtttgaggtcggaggtcattaaccccttgagttcaatctcgtgtatattgtaattaatacatttttggcctgtaagattaagtactctcattacagcgcttccaatatatattccaatgatctatcaacatgaagctattcagagattacctggtcaccatgagttaatttaaatcgattcaaccaacaataataaagataaattaagtctaagaacgacttttaaatgccagctagtagagagtgtctaattaatcaaatgcgccggtatttaatgctagttgtggctcaattgtacaaaggcttcagattaaaggtctcatagagaccaaacccaatgaaacaccaagcaaaatgcaaaacctcctgataccatctaggaactgaaccaatcaagccttcttcgtcttggccttggaggtccgcactctgaagaggtaatagagcgtaatagcagcaaaaatattgaaaaagaaataacaccagaagatcccgtagtttcgccagcgatgaacccactcaatcttcctcgcagcaaggtactgatccgccgaactgagagaacagtactcacagccagacgtagcattgtaattggcaagtgtcccggctgcagtttcgaggtacttctccatatactggaagcaggtctgaccagaaggcggatcaaagacactcatctccgcagcattgcactccaccgggcggccatggagcgctgtagcgctgataccgccgatgtagtaggtaaatggtgagacgcgatacatgaagatccagaagcggggcagatcatcgggcggctgcatcacgccgttgaagatgaaggaaagaccgaacatcagcgtggcgaccatagctgcgagtgcaggctcggggattgcgcagacgaccagctgtgccatgcttgcggcgtagatgtagaattggacgataaatagcatgatcagtgcgcggcgctcggagtcctggtcggcgccgaagacgcaccagtagaagcaggcccaggagcagacgccgaggcaaacttggaaggggatttcgacgaacatctgggagaggatgaagactttccaggagtagatgcgggatgggcgttcgcgaacttcgtagagggaacgttggacgacgaacttgggcatgatctggttgacaagtgtgttgaaaattgtgcacagaaggaaaatactgaagagcacgttttggaagccttgttgggtgttgtctgatttccagaacgagaagccgatgaataatccagacacaatacccaagataaatttggagtagacgtattctggctgacggtagtactgctggaagactcgttcaagaacataatacagctggcttctgagtggcatggcgaactcggagttgtcgtcgtcaaattcgtcaggcccgtccaatgaaggtcgataagaagactgtttgggatcattatgaagtcgttcgacctcagcctgtacctcttcatactccgggctcttgttccaggccgcaacccagtcgattgggcaagaatctccagcaaccatttccaagatgtattccgcgggattttcgagttcctcgcacggtcgggcgccgttgttctcgaagtaattcaaaagggtggaagactgatttccgatgtcgccaaagtagacggtctttccccccttcgcaaggaagagcaaacgatcgaaggtttggaacaactgcgcgctaggctggtggatcgtcgcgaggacagcctggccgtgatctgcaagtcttcggagaaattgacaaatagtccaagagctttgagagtccagaccgctggtaggttcgtcgaggaagataagcagggtaggtttcgcagcaagttcaacaccaatgctaagcagcttcctttgctcgacgttgaggccctctcccaggcttcccaccaccgcttcggcgaaatcttccatgccaaggactttgatgacttgttcgacgtactcatacttctcatgcttggtaaccttctggggctgacgaagcatagcactgaaacgcaaagcttccctcacagtggtggtatcaagatgaagatcttgttgttgcacatatccagtccgacgggggaagtttgccgcaagggtcttgccgttcacgaatatatcaccagagacaacaccgatagagactctctgcgcaaggacatcaagaagcgttgtctttccagctccagaaacacccatcaaggcagtcaggctaccaggcttgacccagccattgacgttgtccaagagtcgtcgggtgccctccttcacggggatatcgtagttgagggagttccatgacagaatgtccttttgctcgggtaaacggatggtatcattggtcatctggagctcgagcttattgacctcctggattccaagctcgatgctgtgaccttcctgcagatacttgggcgcatgtccagggcggaaaaccagcgcctcagcctttgacttgtcatcagtaaggtactctgtcgcaaccaagtaaagtgtattgagggcgataaaaaagccgatgagaattccgtagttccgccacaaatgagagtgcttgtactcgtagtttgcttcaatgaaagcatccccagatacagttcgttgaccggcgactgcaccgacagtggagcagataaaggacgtcccagttccataactcgggatgaatgcggaacagtcaaatgttcgaccatggaattcattggccacgagcgcttcgaatgtatagtagatcgggctgatccaccggatccacgaaagccaaggatgcatatatggctgtgggagagtaaatccggtatagacgacaatgcagagcacaagcacaccggcaatcgccatggcctgcccaacagatttggtcaaggcaccgacactgcggaacaagccagacatggccagaactgcagtgagcaagaataggtagtggatgaagaaagctcccgcttcacggcgcaggtttgccataaagtagaggaccactgtgaagattgagattcgtatgatcttgatcggtaaatcgatgatgagactggctagtgcttcagtgaacgggtggacaaatgcatacccagcttgcttttcgacaacggggcgctgggcatagagttggaggatttcgttgatcgtaagaatggcattcatgagcacagcaaagtacatcactgcacccttttgaaagaagaaattgggggtatcaggagtattgtagaagatggatccaatgatcagagatagaatgatctgaacaataaccggtgccatggctgttggaagatcttgaagcattcgctggtaggctctgtgtatgcacagccgtacctgcatagggatggagagaagaaaagggctacgagctcgagtgtggcgagcttgctgctctttgtggctttccatgagtcttttcttttcgtcgacatttgggtgatgttcacgttcgaattcggaaatttccttgtgtaagagctggtactccgggctatttttccaatactcggaaaactccttcgctgtgcgggggaccttgccttccatgccaggccgtgccgtgcgttctgctgggttggtgattgcagtcaaaaagtcaccactgacttggcgctcaagtctctgccatcccatgtcttggaaataggaaactgcacgctctctgggtccataatagatctggtatccttcgtatagaagaaccaccttgtcgaaaagatcatacatcgactgtgatgcttggtaggcggcaatggcatggcaggattgccccatatcagccgaaaggcgcaatgatctcacgaatttcagggcagatgcggcatctagaccacgggtgctgttgtcccatgctccgatgcgacagcgagacaagaacatctcggcaatactgactcgctttctctcgcctccgctgacacctcgtacaaaattgttgcccaccttggtgttgtagacgtgggacaatccaaagacggacaggacaacctgagtgattgtctcaacgtattcattgcgggtcacacccttcaggcgttgttggggtgcacgagcatgggcggcgaatgtgagggtctgacctacggtcaagtggggaaaatgtaggtcgacctccttgttgtatgcgacatctcctcggtgatgtttgatcatatcttcaaatgcgattcctttgtaatggattgaactttcaggccccacggtcaaacccccaaggtgtccgcagatagtcttcaggaatgtcgtacatccacttccaggtcgacccagtacaagaaggagctctcctccctggagtaagccatcgaagttgcggagaatttgtcttggtggtgaggtatgcccagtcaaagctctggttgcagctcggaaggggactctcaaactggaagtgagggtttcctggtattgtagagcggagccagagccatgtatggatagattggagaataccacgccttgattgaggatatcgatgcctgaatcgttgacctgctccagtaccatttgcgcccatcggcgatgatcgaatcggggattggtgggatcgaggtatggggggataccttcttttgtgctggccgatcttgaaagctgttggccgattttgctagaggcaatgcgagtcaaggtctgttgttctcgctcctctagtatagttccagtgcgttccgtgattggagcgaactcgggatcaccatagtcctccatggcgaggaatggaccaatgtgtatgtttgtgtataattttgagctcctgggagcatcgggcatgcccaacccttttaatcaaatcatctcatcggtaaacggacaacgaagccaccgaagtatccatatttatttcatcgggttggaggctttccgatgtataacggagggacggactccgtttcaccgaaagcttctactattctagttattctagtggagctcaggtatacccatagcctataggtacctgcctattattagtattgagaagttttctcgtctgatcgatgattctcattgaaaagagatacggcagaaatataaaaaagccggtttggttgcatcatactgcattgcatgcctgtcaaatatctacaagtcacctgcgcctccgttcagaatctcattattattatactccgagctccgtacggagtacacggatagatattatcttcaaatactccaattcaggttttgaaacggtttacgacgacaataattgagtctgagtggagcctcgctgaatatccatcccgaccccgagcgtaaaggaggtatcggcgattaggggtgtcccttatctccatggtctttttgtagtgtttgcaatgtttgcagtgtttgtagtgtttgtagtgtctgtcatgcttgcatcttggcttgtagccttaatcctcagacatcatttcgtcacccagcgctagactagatcgttgcttgatatgaataagaatctacttgtttaaaatggacaattacttacctccctgactatcgagtgcaatcaagtattctggagttgccaatgcttattttatatcagtgctaaaactcttttgatgactattcttcataatcacccagtccgcgaatgactggtaggtcactgtatgattgcatctgttgactgcgtccaaaggccgtcactagacacactttcagtctgcctgggacctcatgcttcgagaatttctgatacatctctgcgatgttctcgaattcgtccacatacgtgaacatccacgacgtatctagtttaccttccaccaccagatccattaagaacggataatactgcgcctggtcagtcatgaattcagaccagaagaaaagaaaacctaccttttgcggccacgtttgacctccacggactgtcagagctttctgcatcaatggcccgatcgggaaatcatgcgccgtgaaaaagaaatccccaaccaatgctacgttaccacccttacgggtcgccttgatcattgccgataatgtatcactattatccctctcaagcccaatcgcccgcatagccgaatactcaggttcctgcgaagtacgatacccactagcctcaatagactgatcaaggccgtggttctgaagcgacagaatatactccgccacgtccggatgcccatccacattaaccggaatcatgccaaagtcctctgcgatctggagtcgcgccgcatccttatccatggcatagacctttttcgccccacggagcttcgccagtcgctgcgtagcgaggccaataggcccacagccccatacccccaccacatcgccatcctgcacctcagccaattccagcgcatgccaagcggtagtcacgacgttcgtcaagcccagtagcttctgcgcatcgacatcgtccggcgcccggacacacgataagtcggcatgcggcacgcggcagtattccgcctggtcgcctggatacccgccacacagccggctgtagcccagcttcccgccgagtcggtggccgtacgtggattccgtatccggggatgggtttgtgttgtcgcagagcgaatactcctgtcgctggcaataactgcaggtgccgcatgagatgacgggtaggatgatgacccggtcaccgggtttgagggtcttaacgtccggtccgacctcttctacaatgccgagggcttcttggccgagaatgtcccctttttccattgcgtctttgagctcgccttcgtagaggtggatgtcggaaccggagatcgtgcagtgggtgatttggactatggcatcgctggggtcggtgaccttgggcttgggtacgagtcccacttcgatttttcgtgtgcccatccactgcgctgccttcatcacttccgtggggtgcggcgtgtatgccgtgctgcgttgtattagattgaggctggctgtgtgcggaggcatttcttacctgggcattatggccgccatagttgtgagtagtagtcaattgccaactcgaaaaatattagttcgaatgagtatcgaggggacttattgactggctgttgatactgtcgacgtatagtcgtttgctccaattgttgaagattgagctatggtagacttggagcaatggcaaattaacatcaagatgatgccaccaggagtggccagaaagtcatagagttgccatgaatggtcatctgatttctcggtcctatggtttttcagaagacatatccgagccggaaactaaggccggctatcaacacctaacggttaaggcaaagatcagtatagagtcaataacattgcagttagggtatctcgatctcaactggctttaaccacactatttaaatttaaaagtacatttgttcagcattggttcaatctcatacatacactggtgagaacaatgtacaggatcatttcgatgttggcagggataacaagtcaatgcatcgtattcatgcgaaaagaaaataggatatcttaaaaagaagaaccggcatctttattcgcccgctgagcaaaggacttgggcagtttggttaactggccgctggccataatgtcccccgaatcactctcgctcctgctatcatcgccagactcagatttgccggagctaggcacctcgtatacattactggggcgatctcgggcagacttcggctcaggtcgcagcttagcagccatttcctgttgttggctgctaaggatatccttgagtgttggattcgttttctttgcaacaactgcccgaggtgtggacttttgcgcctccagcttctgttcacaggctttcagttcattacgcaagggttcaagtcggtcgcggagcgactttcgcttaaccattgcgagcctagagttggctaatttctgcaagagttcctgcatctcagttaaaatgaaagtaagctggggatcaaaggctttcccaagcttgcgctttatttcttcttcctcctccctttcctttttcttttgttttgtctcctcggccctagactgtgccttagccttcttttcgatctcaatttcccgggtcaactggtcgatatcaacgccgagcgggtagaccacttgactactggatggtatttcctgaacatgcccggaagcgggtttgggtgtttggttatcgttattggtcttaggcgtgacttggctaaatttggaggtcgaaggtgttcccggagtagatttagcattgggcgtgggcgtctgtagagtagactttgccttatgtgtagccttccgtgggctagggttgttggtaatggaggtggatgtgctgatcgcagtctcgcgcggagtggagcgtggagcaggattcaagctagaagcaagttcctctccttcggcgaaagacacggatcgcctctccgttgccggggaatccttaccacggatagcggattgcagcttttttgttctggcaatcgcaggggtatgtttgttaacagcagtcaaagaagactcatcagtaacagaaactttgccacttgggaaaagcggcccaccgagtgactgctgggtaggtgttacgtttgaatcctgtaggctgacgggctgcttgctaggagggctctgcgtaattcccagcccaattccagatcgaggaggcttaggaggcgctttgttctcctctcgaacactggcttgtcgagctggactcgagaaagaaggcgcacgggatcgtctgcgaagtggactcgtttgggcaggtggcggtttcgatggggactgccgagcctgttcagaggccacaatggccgcgggcacggacacaggaggggtagatgttggccgcgtcgagggatgggcctgtccttggcgagcttctttgaccgacgttggctcttcggaggcctgctttcgcttgcgagatcgattctcatgggttgtaccatttgttgttgacatcgcgagatccagatctgaggactggaagctcccgggtatcacaggctcttccatctgtgaatcgccctctagatcaatcacatccccagtgatcggattcgagttatcaatttgagacgtgataggtccattctcttcgctggcatcagagtccgagtcagactcggactcagagctatcagagctatcagaactatcagagctatcagagctatcagagctatcagaactatcagagttatcagagctatcagaagtgtcagaagtgtcagagatagtctgatatcctgttttcctctgatcctgctcggcgttcttctttttctccgcttcgaccttgtcatcctcgctgtcactctccccttcgtccgactcctcactagaggtctcgatcacagtttccgcttgagatttctgcgggtgggatacaatcttagccattgtcgccagatgcccttgtgcgttgactccattggtcatgtccgacttggatggtattttcacgttacgttgcggagcagactctggtgccacgtcactcgagctcgcggtagcttccttggtagattgtgtttgttggtgggggatgatatggttgggcgcagacgacatgggtggggattcagcgtcgtcagggatttgcgtgattgttcgcttagctgtactactcgcaatgggtaactttacgagcttttgcggattaggttgcagtggtgacccagcagctacaggtgcagctgtaggctgggatctggcgctggatgctcgtcgttcggctggtgatggagactcgcccagctcctcactttcgtgcctgggaggcggcgttccagcaattgtagggcctacagacttcgctggtagctgaggggtagagcggttgccggtttcaacagaagaaagaggtaaatcgcgattgcggtgctcaacaggtgacttccgagctgaggcacgagggagattattgggcgatccaggcgaatgttcccattgcatttgatcctgggaaagatattgagagtgaccgcgcgagggttggccgttgctctcctcatcttcttcctggatggcagggaattgggcttccatggcttccttcttagcctccatggcgcgcttgcgtttgtaggcaacaatagcagcatcccaatcctgctcgacagaggggaatcgctccggggcagccgcggcaggcttttgaagaacgcgaacggagccacgctggtcaaggccatcggcgcgagctttcccgtagtcgacccagacatcagcaacagtcaagtcgggataaagatcgaggtcctcctttgtatcgtcgagaatcttcttaatcgaaagcgatctatcaaccaacaacaatgttagcaaccaaatttcgacagactagataagtttctcatcaagtatatgaacactcactccagctctgggtggagctttccccaatgctcttgaatcatgtccgcaagtccaccgagcgaaacctcttcagggtgctcaaggacaagcaagaagacaccgggtttcttcaatgtcggttcctggttggagacattgttggtagtctttcgtgcgccagggaaggtcctgccgtagctggagctcgagttcagctgatccggcgggaagactttaattgagagtcggaggaacaccattgcgccagataatagaataggcagtagatgaatatgcagctaatggttgtgattggagcaatggcgcgtgagggagggaggtcaataaaagccggtagagctggggaggggcaattaatggtagggagcaaattagcaaagacaaatttatcagacacacatgtcctctcaaagagacaaggtgccaaacaccaaacggaatggtgcagggtgagtgggtgggagggagaagaaaagcggaagaaactgacgcgaagtagtaattgtccagctccacttaactagtgtactagttatctgccgtgactatctataaaacacatctgctaatttaaatgagaagagcaagaagataataattcatggatactaggctattgttcgttgtatcctaaagtcctgtctataatctaaggttacgggttcctgcgcagttccatacaatatagatgaacagtacagacacaaattcttgtagtattttcatatatgatttttaaataatgtctctagagatggatctattccggaggcacaaaatacctccggaagcgatcattgtgagctaaatccagctcaacaatgaccgaatgacagctcatcaacagacttgggaatctgtatgtccagaaattgagatatccttcaggcaagccaccaatattatccttaagatgatcaggcatatcgttgtagtgattgcgcttgttgcggagagccctcaggagatccagcatccgccccccggtatatttgcgctgcttgccgagattgtctttgaaatcccgcggcaatgagcgcaggaaatccatgtcgggacccattactcgcttggccactgattccaaacaaagcagtgcgtctgatggaggctcgcggggctcaaattcgaagtggtcagatacatcacaaaggaaggcgagacggtctgatgggggccagaagaacgggtgcattaatacagcgcttgcatcaggactagaaattcatgttagtaagttgggtatgtttccgcaaagaagagtgcttaccgttgccgagggtctagagacagcattgagcggatcagatcatccgcctcgaaagcgtagtcgcctaggcggcttaattcttccaaatcgaattggcccttgacgatgtttgcttcacgcatgaacttgccatttttgtcgaatgggtggctgccacgagtcaagacgtagtagaacacacaacccagcgagaaaatgtcaatggcccgagtggcgcggcggttggtctgcgggtccaccacagccggctccgaagactcggtatgctgggatgcaagagatatagggccgtcatcatccaccaggagctcgggggcacgccagccggaagttccagcggcgtgagcagtggttgcccggaacgagctttggttgtcttcgagtttcttgcacaagccaaaatccgagatgaggagacgcaatgaccgcgaaacagtgcggccacggggcatagccacgaggatgttctgcggcttcaaatcacggtggacgatcttcaaagagtgcaagtaacggacaccctgtgtaatctgccgcagtacgtctggcagatctaagccggcttgaactagttccgggtagctagcaggacgctcaatcacatcctgaagagacgctggacaaagctcgaggccaatatacaggaacccggtggcttgttcacggcagaagtatcggatcacgttgtggtggtcatcgctttcctgcaataggcccacttcatgggacgcaatgtcatagaattccatcaacatacgcttgaccgcgacgtctcgtccgtcgaacgaaccgcggtaaaccacagtgccatggctgccatgtccaagcacaacatcagtgaaaacccgaagccggcctatgcgaaccacgccatccatctctataatctcgttcgagatcgtcctggtcatctgtgcatcggtttcaagtcgaggctggggggctagggtgttgacttgttcggcggcctgatcggctccttcggggccatcaccctcactgccaggcttcttgcgacggcggtgtgcctttcctcctcgagatccacgatagcgggtttttttctttggctttccaggctcatcggcatcctcgtcaccaggcccacgtgacggctcgcgaatctgcacccggagggtggaatctggattgtattctcgggaagcacggggggttaatgcgccctccggtgatgcatcctctaaatctaagtccactgtgacgtttggaacttcctgggttggtgtagatgaacgcttgatatccggggcaccgccgacaagaggtgtggaaggggtcgagagagaaggcttatcattcgagttgatgatattcttgatgtccaacttctgctttgccaaatcgcgaatgtgatgcgagttgaagtaaatgaaggtgcagatgaacagtaaaatcaacgtcacgacaatatccaaagcattgtcccagctcttgcgaatgatggcgctattgcgcaaggcgggaggcaaagccagctcagaagggctgcgaaggatatctcgtggtgtgtcattggaaagttcagaggtggacgatccggcgattctaggaatatttggccggattatacgagggccagtgagagagtgaacaccggccaacgcattccgctgctgacgcgcactcagactcataagcgcttgcccccggcggaagaagtctttgtcatagcattgagccattggagcccggcccgtggctaggggataggtttcctccgaaaaggcataccagccccccgcctcagtgcaatcgatgtatacacgcatgtccctttcctcgttaagggatccataatctggatccggtggctggctgggttgtgagagcaggactagcggggtcgaggcatctggtgtatctttgttggcaggacgaaccacgtcaaagactcgcgccacaggagatgaaaagcgctgggtatagcgaggccgacccatgcgcgagtgatcgaatcccagtacaacgccatcatgcatactgtaaatgtgactttcatccatcgtcctgtagtactggctttgtaggtccatatcacgattgtttggtgcccactcggagtacttcaaggtacaaattggatctcccgtctccgtgttttgtatggcaacggcatattcaacccgaccaagaaccaaagtgccagatgtcgactcgcattcatcagattccaaatcttctccgtccaccttccgacattcaggtgcagcggtaattggaccacgggaactaaacacccgcaggatgctgccagtccgggcgtcaatcgtatacaatgtagtttccttccgggcagtataggtcacggcggggtcggtgccggaataaggggtttcgtcaacaagctgcttcactgttaagccgagcttttgcaagccggcatctggggcggggctgtagatatataggctgccatcctggctcggctcgacgatccacaaaaagtcgtcttccggttctgtatcgtcaaaactggaacgattcgctcggtggtagatgctttcgaccacaggactgctcgggacctcgagggcccagcgagcagtcccggtcttacgatcacgggcgtgaatggttccgtcgacggtcgccagcagcacaaaatcctcaacctcccagtcctgcaaggaccgcgcgtgaagctgcgaagccaaaccagcagcagtgctgctggcttggacaggaggggctcgaacggcgcggccggagcctgccagagccagagtagcaagggcgctcgcatcgttgggtttcacgatgggtggtgcggctacatgggccgcattttgtctagatgactcttgtgctagtggcacagagacgcgagatatagggtcatgggcatctgattgctgcagcggagcgaccagagctgggagaagaaggagtgcgacactggcggggagtgtcgaacggacgcccggcagccgccaccgcatcgtagagctgtcagcacaaagattgaatagtagatgaacgatcgagggagcgaagcgggtaggggcgtctcatgggccgatgtgaaagggaagaggtttaatggatcgagtgatagtgtggagcgagtcgagtatccgggtagcggatcatcccccaacccacaaatgatcgaaatggaaaatggcaggaaattcagtctaatgataatgcatgaagagatggatggaactgtcgaggatgccacaatattgaagagatgaaaggatgaaaggagagaggttggagagcaggcagagagattgtgtgtaatacacgtgtacattacaggctgtcaccaggatttcccgcctccactgctgtaacggtaatgtacggtactttgtccacgcacgccttcgatctacactcaatacagcgtagcctagaacaataagaacattcgagagccccttgataggcgtaatccatataacgtatgttgtatacgtgcttatagatgtgacatagaaccctctatgttttgtaccagtcatccttacatacccggttcttgcttactgcgtactaattatggattgatcatttgggacgagtctgtcagcgtggatcttcacatgctaatgacgaagattgaagcctttgagcaaggtgggtcaccctgcgcagcgtcagggggctaagaccaatcaagggcgagacagcacactacgttcaagggtctcatgaagaaagaatcagtccattaccaccaaagatttttttttaaaaaaaagaactatgtaaatcaaagcagcacatccaacgccacaaccccgtcttcgtgcagtacacgccggaagtgccagtgaaggggagggaaaaaaaaaagaaataagaaaagggaaacacaagaaagatcaagataaatacaggtgtagagggatgtggccacagaagcatgtggagagaaagggactataaaacaaaaaaaaagggatatcggatgttcccaagaaagaaaagatggtagatattaagcgtgagacgaccttaaccgccgcggatcatccaggtcacagcaacagcccagccactgacgaagatgacggtcaagatgcctgcacctgcacggtcaccggtaccgatggtattcaatacagggacatcattgtccgaagtattagtgccagcggtcgggttactcttggaagttccacctgatgttaaactcaatggcgccttgttcttgaacggaatcagattggcagccaggacacccagcacagccatctgttgctccagacctttggtcccgtcccaagcggcttgcttgtaccagcgaataccacaatgtacaccgtcatcaccacccgagcattgctttgcagcggcctgggctgaggttctcagctgagggaagatcaagtcgtaggtgtcggggacgattgtagtcaacattccaagccagttggcgaaataggccttgaaggtaatttggttgcgatcacaattaccgccggcttcgcaggtgatctcgcaaagaatttggccaccgtctccattaaatcctgtggtcgggtagaactgctgggaggtcttgatgaggcccacaacaccatccttccatttcgtttcagtgccattagtctagtccgaggttagtatcaaccattcttaggcagcaagacaggacatacgtagttgtgcatgtaggcggcaccactgatataggtggcatagttgtaggtccactggtaatcgccatgatccgtgcactgcgtgccgcaggtggtagtatcggcgatgttccagttcttctccttgagcagcggggtggtagcactccaatcccaaatgcgttcagcccagtcagcatatgtcttatttccggtgtagagggcgaggcgggccgaaagttggaacagtcctccgttcgaaatcgcgttcttcgtaaggtaaccatcctggtacggccaaatctgccagcgcataccaccgtggcagctgctcgtatcccatcgggggtactgggtgttgaagacaccctgtgcgagagatacccaggatggttcgccatctctttcagggtagttgaattccgcggcggtaatagcagcgagaccccaaaagacctgatcgtcgttgcccaggtactgactatagttgctcgggaagaaattgtcgtcacccttctggaaatacattccgtcctgaacggcgtcgttgaactggctgtccccggacacgaaccagtacatgataagggtcatgaacatggaaccgccctcccaccaagtgccatcgaatttaccagggatgtccttggagtcgcgagcattgtagaaatccatcatcgtggtggcgactgttttggccgcatttttcagggaggctgagagaagttactgaattagataatgaatgcgatcgaagggggggagaacgtactctcgtcatcgaggttcacatcgatagcgagggcaccctggacggcgaacgcgccacccagtagagtggccagccacttggacaaaatcatatgtgggatctcaaacgagcgtaaaagccagtggcataagggagttgaatcaaggaaatagaagtttggagagaaagtaaaggtggctaagaaaagatgacggggtaaccggcagcccgggggttacagtccctggtacagtgggctggctccgtctaagaatgttgagttattttaacttccacaagtatgaacattcttacgattattatattctatagattctatgcattttatatattgaatctacattctgcacttcacctctaacaataggaagtatagaattaccaaattgctgaattgctggtcgactgtccctgaacctaaaacgatgacggttagactcagttcctggcggcaaatctggccctgcagtaacgaaatgaaacattaagcttagcgagacaaccccttgatatttgcaattgatcatggtgtacctacaaagtacaacgtgttttgaccagacaatgtcgatctctaactgcacgaggatatattactataaagaatcaaaagcggacaattgccttggctaagggtccgaactgaagtcaccgctttgagtctgccgcttcgggaaccggtgccttattgttcaggtccagcccgaaaggcacatcaacaagacgtaaggtgtatactttaaaccttggaatagttcatatgagtatgagagttgtgctcaccatatgcaggcctgttgtagggttcccttaactctctcgatgatagactttacaatagtgagaccgtggtcatatctagggtgtaatatatctacttggcagactacaaaaatggctagatggatagatcatgtacttagttgacttctattgcacatttttttagttccttcatagaaagactatagagatgaattcatccatgtcatcagaatcgtgtccattacatccggttacgttggcgaggagccgcacggatgatgttgtccacccgcaggagaagctaaataaagtcagcgcgtattccccatagaaataaaaaacaggtgagtgacatacctcggctgcctctgaggcagacgaaaccaccgccttcttcaacttataagcctccaccacaccaagctcacgcatatctgcaataccaccaccgggcgtcaacaggtcaagaccggagctggtcataccgttgttgatggccgagcgcagacgagtcaccagatcgctggaatccagaccagcgttgtcggccagaatggtaggcagctgcttcaaagcgtgagagaacgagtcgacagcaagctgtttcttgccggtcgtattctgagccgcctgttccacggccttggacatcaccatctcggcgcagccgccgccaagtgtcacacggggatccttgacggtctgcgagagaacggccagagcatcgtggagcgaacgctcggcctcgtcgagaagctgctcggtagcaccgcgcagcacaatggtgcaggcctgaccagcagccacaccggagaacttgatcagggtatcctcaccaatgatcacttcctcgatcagatcacacgcacccagcttgacctgatcggggtggtcgaaggtggaagcgatctcaccgccagtaacaagggccaggcgctcgatgccgtcgaaatcggcgtgctcgatggacatgatacccgcctcggtgaacagctgctcgggccagttgtaaatgagctgacggttaacgaagcagttaataccgtgtgccttgatgcgctcaaccttttggcgcatcttctcgcgttctgccttctccaactcggcaagcttgccggtcgactcgaccttgactcgtgcgccgaaaatcttgaccttatctgtgtccatggctgtattggcgaccaagatcttggcgttctccaaccgcttgggctgattcacaccgaccttcttgtccataatgaaaccctcatcgaggtatgaatcgctcagctttccaccggccttcttgataatctggatgtgagagaggtcggtggatcccttgagacgcagaacggcctcgcaagccaacttggcgaattggtcccgatcttgcgacagaaccttggagctgagcgttgtgcgggcaatggcgtgcaagtccttacggaaagcctcggggtcagtgctgcggtcgaccgccgtagcctcgagcgcggcgagagcagccttgctagctatccggtaaccctcgataatagtctgggggtgaatcttcttggcaacaagttgttcggcctcacgcaacaactcggcggccagaacggtaactgatgtggttccatcacccacctcatcgtcctgcaccttagagatattgaccagaaccttagccgcagcgttatccaaagcgatggacttaagaatcgtagcaccgtcgttcgtcaccaggatttctcctgtcgacctgtgagaacagccatgtcagtaattccggggttatatcaaatgatcatcgacaactccaccacatacgcagattgtaggattttgtccattcccttgggaccaagtgtgctcttcacaaggtctccgacggcgatagcaccgacaaaagctgagagacgggcattttcgcccttctcttcgatgacatcgtcaccaaagatctgtgtgggattgccaaaagatgcctaggaggggtagaggtgagccagtgcgaacacatattttccacgctctagcgagttgggaatagcgtaccataatgaccagctgaataaggcaatcgaccaaagatcaaatgtcttgctggagaggttgaatcgacttctcctgtcaacaagtggggtgggaaaggagaaaagttgccgcacgattggcccgagcttctgattggctgcactccatcaccgcctgcgatacctctagacgattcctttcttgtcgtgacgatccctttcgctgggattgaccttgtttctgtcagtgtcgacaatggctgactctggcaaactcgctccggctgctgcgaacaagcggcctcattctgctgtcgaggctgagaacagtgagtcccctgcctcatggacaccgttcagaccgctccctcgaacggaacgcaagagatactaactgtatgcgattgttaggtggtgactcttctgacgatgatttcggccctgcgctgccctcggaggtcgccccaaagaagaagcggcgcaagcttccttttgagaaagtctacatcaatgctctaccagtctccgcacggtactccaagtcccttatgcacaaggaccaattgtcgtttgtgacggttgccccctatacggactttgtgatcacttcctccgtcgatggatatgtcaagttctggaagaagatggcagaaggcatcgagttcgtgaaggaattccttgctcacccaggcgagattcggggcgtatctgtcagcgccgacggccgcagtttcgcaacagcgggaatagacaagacagtgaagattttcgatgttattacatttggtaggttcaataattgttgctctcccggtctaatgacttactaacatggacagatctcttggcgatgtatacactagactttgtacctcgatgtgtttgctgggtacacccgcgtggggcctcgctgcccctgctagccgtaacagacgagtcaagtaatacgattcaagtattcgatggacgtggcgaaaatcccgaacctttgcacactttgaagtcgatccaccgcagcccggtggtttcgctggcattcaacaacgccttcgactgtgtcgtctcagccgatgaaacaggaatgatcgaatattggagagccggagacggatctttcgagaaacccgacaatgtcttcgacttcaaatcctcaacaaatctcttcgcatttaagaaagccaaatccgttccgacagccatcacaatctccccatccggcaaacacttcgccacggtctccttcccagaccgacagattcgagtattcgacttcgcaacagggaagctttaccgcacatacgacgaatcaataaccaccatcacggagatgcagcaagccggcacagcaccgtacgaactggacgaagtagagttcgggcgccgcctaggtgttgagcgcgaactggaaaacgaaggaacgcgcaacaaagtaaacgtttctttcgacgaatccggccacttcctcctctatggctctctttacggcgtgaaatgtatcaacacctacacaaaccgcgtagtccgcgtctacggccgcgaggagccattccgagccctgaatctcgcattgtatcaaggacaaccgcaacggaaaggcatcgtgaccgtctcaatggcagccagtagcaacccgctcctccagcaagccgaagaacgtgacccaatcctcctctgcaccggcttcgccaaggtgcgcttctacatgttcacgaacgaaacagacatctcgaaatccactcgggacgtccaaaacgaaaagccaacccaatcagcggccggcactggtccaaccgccaccaaaacggccgagaccggcactgctgcaatcctgcacacaactttcggcgatatccacctgcgcctatatccctcggctgcgccacgggccgtggagaactttgtcacacacgcccggaatggctattacaataacacgatcttccaccgtgtgattcgcaaattcatgatccaaggtggtgacccgcaaggcgacgggacgggtggagagtctatctggggcggggaatttgccgacgagttctccgttctcaagcacgataagccgtatacgctctcgatggccaatgccgggcctaataccaacgctagtcagttcttcatcaccacggagaagacgccgtggctggataataagcacactgtctttggacgtgcggtgcagggcttggatatcgtgcataagatcgaaaatgtgcggacgcataaggagaagccggaggttgatattaagatagttagtattagtatctcgtgatatatcggcccgggtggaatctaggcgttgtattacaaaatatgtgtataaggaatcatgaaatgcccgcgtgcgttgtactatgtacacagtcacttggtcagacaggttgaaaaaaaatggcgaatatgaccgtagaaagagaatcgacacagtcgtcggcagaagtcgactccgcctatttttaggacaaaagcccaagaaaagaaaggaaggaaaagaaagagagagaaaaggggcgcaaaaccaacaagaacaaaaacacagcatgaagcccattatccgcaccaaacaccaagaaatgcaaccatggccaggtagcatggtatagaagtagcgcattgcgaaaacaaaaaaaaaatcaaggacaagaaaaggacataagaaacccaaagatccaaaataagaagtgaaccaaaacagattttaaacctgccgaatctccaaatccccagagctctggtcgacctttgtcaatcgcgtgcgagccccaggcaccggggtgctagtcttcgccatcgtagagcgcgagctactagccaaggagtcggcaccaagggcggtggtctgcaccggcaccgggacagcccaggcggcatcgcgcggaccgggcggggaagcagcagtcaagaagctgctgccgccaccgtggtagagattgggccgtttagcatcgtagcggcgcttgaaccatacgccgagtacggcgatggtgctaaacccgatgaccagcacgatgagcatgatgatccagcggtagtgggtactccacctatttaggggggatttatttagtgattggtctggatggtgcagttacgattctaatttgcgctgcggtgttggggatcaaacataccatgacttcttcgtgtccgctgtggaggttgtgtttgtggttgcgctggaggtggaagtcgaagtagaggttgcgtcggttgaggatttggttgtggtggtggcagtgccggttgtatccttgccgccggagttgcagtagtcgacgtaccaggttgagagagtggtttggtctgcggcgctgcaggaggggcagatgctgccggaggttttgaggccggtgagtagggatgactggcagaagcatgaggtccaggtggaggcttcgcctgattcacaggaggtctgcgcgcttgtcagggtggtgcaagtcaggccgcattgcgggaatttgctggaggctgctgcggggaggatggtgtcggcggctaaggctgagattgtgagggcgataagggcgaggaagaggaatgagaggcgcgtagtgagtgacatggtgagagtgatgttttcgagttctctattttaatgaggggtgagtagcgaatgtggaagtgagagccgtccctgaggctcgattagatgtctggataggatgtcttagtccattgttgcataggtgaaagagagaagagtcgcccgaaagaccaggaaaacgagacgaagatggttttgggtctagtcggggcccgaacgattccggattcggctttttggtctttttctttgattttttatggctctcgaggggaaatccgcgggtttgattggtcggatcggtttggttaatttcttttgcttctttaatctcttttaattaccttataaagtagtatcgtagtactgtagtactgtacctgtacatggcatcgcatgcgttttttaatttccgcaaacggaccgtggaaacctcacattctaccttgtcgcattctgacgtctgccaggtccgatattaggttaatgctcggctggttctcaaggttagtttctatggaatgagctattggcgctaactacttcctatgcaaggagtaactatatgtatattctgctgctgtacggagtacaatgtgcgatgtactcgaagtagttatataggatcgagttatttacttgcctattcccttctaatataatttactaacctgtaactcatccgtctttcattaactccaaacaagggcccaccacgatcggcagtcgatacttggaataatgcgatgaatctgcggttaatcgtacaggtacttagctagatacggagcagagaggtttcattgtctttgtggtatactgatcgtctcgttgaggcttgaaagatcagcactagggtgatattccaccgaaaaattctttaactgtatctagaatctaggaccagttattaggggctttattaccgaagggaaggactggcggtagaccttttaggtaatcgcgaatcctagttaactaactaactaactactcgataatctctgaggtaagggaattaccgagcctatattagaaaatatgaagaactacggtagtaaccctctcggactcactggcttatctggccctcttcaccttttgcacatttcttgctagtagaagaacgaggctgataaagagactatctacacgtttgtcaacaataccatagagaaggtcattgccgaggctaagagcgtcggagtcttcaatgaatatgtctatatgaactacgccagcatgtcccaggatgctgtcgctggatatggtgctgctaacaaggctcagctgaagaatattgccaagaagtacgaccccagggaggtctaccaaaagctgacacccttccaccttcacttcttagcagtcaccccatggtattctcctctctagcaccctactactcccagtgatgactctgctctcacacctgtttcgcaggcaggcatgtcggtgcccctgtcccccgcggcagggtcccctcttcagtattattatatacaggaggctaaatcttttttatctttttttcttaacttttacttttcttcctacatttaatcattcggttagatgcaatgatctgagtctgcatccagactcgcttgtaatcacggcagccatgtcctaaacactgcgggcttttagaagaagacaggctgatggtgtgtttattgcgcggatcggcgaacttttcacgacaggcccaagatcgtccgggattgaggggttgcgggtccggatgataagtcgctctgtgattcgctcgctctggatgtcgagaaatcgctcgggaatatgctcttatatactttgttaattccgacggatttaggagatatgtcgccgtcaaggttctattgtatatcataaaagggcttgtcaaatatagttatgaacccagactcttttagctgaatcatcctatcataaacaaaccctcaaaatggcaccgaagttcaccaaactccgccctttaggcaagaatggtcccctagtgccagccattggatatggtatgatggtcatgacgtctcctagctacggggcttcgcttgaagatgaccagcgtttggccctgcttgatcgtgcagtcgaaattggggcaaccttttgggacacggccgagtgagtattccgttcaaagtcatatcgttttaatgtctctgacaaagcaacagtatgtatggtgacaatgagaagcttttggctcaatggttcaaaaggtctgggaagcgcgaccagatctttcttgcatcaaaatttggatatgtcaaaggtagccatacgttggaaatcgacacatctgctgcctataccaagaaagcttgctactccaccttggagaacctaggcattgaatatttggacctttgtacgtgttgaactatgcaatctgcattcgatatatcataacttctccataatagctaacgcggccttagactatgtccacaacgtggataaagttactcctattgaagagaccatgcgcgctctcgtggaattacaggcgtaaggcaagccatacccccaatcaaaactaggtattgactgagcatttcagcgaaggcaagatcaagcacatcgggctatcggtagtttcctccagcactattcgccgggcggctaaaatagcccctattaccgcctaccaacccggctactcacttttcgagcgtctgatcgaaggccctgaaggaacccatgcactagccacgtgccgcgagctcgggattgcaatcgtgtgcgcgacgcctctgggccgaggcattctcacttccgggttcagtcagggtaaagcaattggtgccgaggcggatatacgtgagaagatgatgccgcagttccaggatggtgctaaagagcacaatgcggacttggcgaggcagatcaagattgttgccgacagaaagggatgcagcttgtctcaattggcgcttgcttggctacttaagcagggtgacgatatttttcccattcccggtactaagagaatcaagtatttagaggataatatgggggctctcgatgtcaatcttaccgatgaagaagaagcggagattagagcgctcgtggaaaagactcctgtggttggtagttcggttcccgatgcgtttaccgggatgctctttcgcgataccaaggaagaatgaattatttatatccagacatagaatctcatatagaaccacatgcgtcagagaatacactacaacatatgtatcaggtttcgattgagaacatataataggtcctagccacctctagcggacttattgatgtgtggttatactgtaagcccccgggttatttgtgatgtatggacaagttaggcgatctacgtaaagaggccaaattagaaaaacaagcaatagcaatctcagggctagtccgtgaggaaatctcggagatgattggataacagctccacctattattcctcccccgcattccctcccttctccaaccctcccatcataccgacaatgccgacaatgccaacaatgccctcccggcaactcctttcaaccctaataacctccctcaccaacacccgctggaccctaacccgaactctccggagcgaaaaccccctggatctaaacggcgagcttcgcgggaccgcaaccttcaccccccaaccccccaccaccacagccgaccgcgactggctgtattgcgaagaaggcgagatccctagcaatgtcggaggccccttaccagcgggactacgttggacaaagaagtacatatggcgcctaggcagcgacagcggacacgtcagcgtctggttcgtgaaagtcgcgtcgggcccggaagaagcagactacttattccacgacttcgactttgattcgggttcgagttcgccgctagggtcggaatctgggtctgcgcagaaggatcccggcgaattcgtcgcgccgcccgtgccgcccgctgtgtcaacccccggcaatgagatggagactactgtgcttaatgctaggggcaaccatctctgtatcaacgatatgtatcgcacggcatatgcgtttcgcattgagcctgataccggggaggtgcttagctgggctagtcggcatgttgtgcgcggcccgaagaaggggcaggatattgttaatcggtacgagaaggaggcatgagataagatttaaagtaacctacaattgtgatgcttctttcatgaggctacgcggatggtcgggttgcttggaacctggaatttcccgaggtctactgaaatcacgatcgtgatgatatgtctatggatgttcatatattcccacttatatctcgatctagctccgctcttcattccacgcccattccacccctgctcacagcgtgtaaaggaaatccggtcttttgtcacccaacaactcgatctggctctggtccaagccctcgatccagtggtcgcgttcgccacgtctgcgcttgccgttctcacgccgcagcaggaggtactgcaccacggatccgccaaagaggaacaggaccaggtaggcgagtactactccgtgaccggggtagtagtttggcttatcattatcgcggtagatgttcgatgatacgatgccgttgagatttccccagccgatgataaaccctagggagacacctcgtttgtatacacctagacagctcgagttagttttggctgtggtcattcatataagaaaaaaccggaatccaggttgaaattaccttcggtgttgttactagtccatgaaatcgtgttcgcaatggctgggtagatgcccatggccccgaggaaagttcctgcatatcgagcgccggcggacttacagcctagtagcatagcgaatccaatcataccgaggaacgagacggcgatattgcagaggccacgctgtcttgtacggtctgcaatgaagcctactgccactgtcaagacggcggcggcggcatatggcggtacactcagcaactgtgcacgaatcgcgctgtagcctatagaagcatccagtcagtaaatagctccgatataccgagcgcaagagccaagcttaatattcaccctaggaaatcttgttagcttcagaatctccaatgtggcgatgtgacaactcactaattcattgataatagtaggcacgaaaagcgagaacgcataaagcgacccatcagcccccatataaatcacagccccagtataagtcttccaatccttcagactcgaccagaagtactccatcttgaactcctcatgctcagcactcgactgctgatccatagcgagtcgcctgagcacgcgcttgcgatcgggatccgacaagaaccgcgcctgatcggggaagtcatagacacaccaaaatgaggcaataccaatgaagaacgtaagaaggccttccaggatgaaaatccacgaccagcctggcttgccggccacgccgtccatcttcgcaatcgctgctgctagcagaccaccaaatgaacctgcgagcgccgccgccgagaagaaaatcgccattcgtacgccgaattctgagcgcttataccagcatgagaggaaatagcccactcctgggaatagaccggcttccgataggcctaggaaccagcggactgccatcagcccgtggtagttctttacgaagcccatgaaggtcatgcaaattccctggaattggttagaagagtaatgtgttggaagaagggaagatttcacttacccatgccatcataatgagtgggataaatacgctcggccgcatccgctttaacaggacgttggtcgcgggctcgaagaccgagtacgagacgaaaaatatagtcagtgctgcattgtattgggcattcgtcatatttagatctgtttttagaccgacgagctttgcgttgccgatatttgtccttgagcgcggtgagattagtttgtgatatttcctcggaagccagtgcgcgaataagatattgctcttttgcttaccggtcaaggaacgagacgagatacagtagactgagccatggcacgaggcggatatcgagttgccatagtagtctacgatcctatacggttcgtgatctggttagttatcgtgactttacacgatgctgaacagaaattgataacatacaatcgccgctctttcttcgtcgctcaatcctgcgtcgggatcctcaaatccagctgcagcaagcgcatccttagaatcggaaatattctcagggtcctcggaccaggattcggtttgtttgtcggaggattcaacgaccatgatgcaagatcgagcagaggccgggggatggtcaggaatgtgcgattgctctacgccgaccggcgagctatttaagaagaacagggaacaggtcaaagcagaaaaagacagccaccaagcgctatgtaaagaggggcagacatgccaacgcttatgctcggcagatggtcgagatttgccagggtccagctgaaaatggtatgatccctacatcctagcccgcgtcctaaccgcgtacaggggttgctgcattagcttgaatctggatgttggggcccgttcaggcgtgatcggcatgtagaaagtgagatcatccgtggaggcgacttcaaacgggaagaaaaggacaagtatgtttgtacgccattgtacaatatctgattcagcttgatgttgagtcttgaatcccccattttagtacatttttgatacattggataaataggccaagtctgggcatccggggaaaattagggcatcccccgcataccccgggctccactaagcgaagctttgccccggggccgtctcgatctcatcaatgttggacacatgtacggagtcctgccaagtctataacggcccgtttatttaggccgacgcggagttttgcttggaaacctgcctacgatgtgcactcggccgagagaaataggtggtgtcggccgacgtagtcgtatgaaatgttgatcgccaaaagttccctcgactatcgagccattgaccgtgtagcctctcggatccaccacagatgaccaccttttgaccatgttttcattggacgtagtgaactcgggatagtggaaggattgtctcggcattgaccttgcggcaggttcctcctccgtagccccgaagaatttgtgccaatgatcatgcagctatatgataatatagaaagcgaattctaagaggtctgatttttcactgacagccacgctaagccccgcattcaatgtgcgcacggcttcactgacgttgcggggggtgatcgtcgcacacaaagttgcgtccgcagcgcagtagtacaacatcggcccaatttgatataccatgagctgcaataggcggctcatggaacaagcgctaacttaaaagacattgttggagcgaattcgggtggtcgaacctacgctgtcgaacttttggcaacatatttgtcgtatgaagctattttagaacgctcgttatgacttgtctccggagtttaacttggattttggtagtatcattttaatttgagttattgtgaggtctaaatgtagactcccaggaaaatttacataaggtcgagtcgggctcgcaagaaaattaccttgccggtaagaccaatggagaccccaaactcatggatgtatgtacttgtaaaaaacgcgataaccgagacgctcatgatcaatgcaatgcgcccattttgccttgatgtagccactccagggttaaacccgccttccatgaggcggatatgaggcagtcgattcggagcaagtgatagtattgttgcaatacgtccccaatctatgcgtttacaaaccgtcatctcgcttaatatcgcctggacgggattctggcttcatggggttaccaaatccattgacgcgtccatggagccacttgagggtaatggtgctcagtgccatgacagcggcactgagagtaaataggccaacacgacctgatgtgggcagtgcttcgaagatgggatatgggtacctagactgattagcgattgacgtcggaggtgctgggtcatacacgaaccatccgttctgggagaagcattgctcaatccagaaccagtagccgaaggcgatagtgccagacaatgcgagtgcagggagtgcagtgattgtccagggtggggataggagcagcaggtcaatcaacatcaccaccgacggtgttgcgtggaagctgatgtctagaaccatgttattaggggtatctcaaatgcactttttacagacgtaccggcatggacgggtataacaatatcttcgggaatcaccaaacgttcatcgatcttattttgattagaacattgtcgaattagcatcgaattacttactaaacgaagaccccagtacaaaacgctgatcacaacctcaaggggggcactacatgtcgataggatgtttttgaccaggaacagtcgccgggacaaggtaatatccgctagtagtgcaaccgcaaaagtgagtgttgacaacgatagaccaatcacggtcagatattgaaaatgccaaccatatgcttgattactgtcaaatataaagttcagcgtgctttccaatatcgaagctagacgggagcttacgctgggttagggttttcgtgcatgcttcaagaatgtcagcaagaactctaaaggacaacgtagcagacgacccatactatttgaatgaccacaaaaaactcgaaagtccggccaactagaaggcaagcccttagcgctgaaccgcgatgataagtgaaaggaccatggtacttacatgaaccaatgccgacaagccccgtgaaggactcgacatccattggagcgggtgcctatcgatcatagatttggccattttggaaaagaaattagggatacaagcgctctcaagtcctagttcaatgtcccccgaaaatgctatcagcgcgcagctcaaggaaccaatgtgcatccaaggaaccggatgctatgacgttggttcaagatacgagttcacgtgacacgcgggatcaatcggcgtctgtatcggattataacataacccggctgattcatcgttccttatctcccagggctcggctggccatgtgcttccccacacttttagtccgcgctccaaagataacctttgcctttcttctttacatcaaattgtgacttttattgcgaatctgtgctcttggcctgcccagtgaggtcagtcgactacctagtgggtcaatcgatcatattgaacagatccatcttctgtttgatatcttgtttcatcccccaaggtcgccaagaccggcactccactggttactaccggcttctcttgccttcccattgctgaagggcagtgggactggaactgtttctggcacgtctctcccatacctcgatgtgcttgtatactaggtgtgggtgtctggtcgattatcgcttcgtcgctacttggggtcaacgaggatcgaaacgcagaaagcgtgccaattctgacgtgctttcggcgtaaggagtctcgattggactgatacagacttgaaaagactgaatctgtatggccgcgggaaagtatatagtgacctttggctatttcgagccgttatcttgaattatcgccgtgtcctctttacaggcatcggtactcgaccagacaccctcgacgtgcaatgcctcgtcctagaagacctggtgcaccagaaccaaagcgccgaagtcgtaaaggatgttggtacgttactaagatgtcaataagctttaccaaggctaacagtctcattgggccatgcaaagcacgcaaggtaaaatggtaagaagcacaacccttgtatgatgctcgtgtagctaacaattatgtagtggtgaagagaaaccagcatgtcttaattgccagcgacaaggcgacccttgcgattatagtgtccgtctgaactggggaggaaggacgaaacgcatgtcaattgactcgccgaattcacaatctagtgggtatggaggagctgtaattggattttcggactcattcgctatcaacgatctgagcccagtttcgttccccactccagcaagcaacaaccctgcagatggatttatcaacactcatcccggggagttgacttcgccaagagcaatatctccaagtacatcatcacaaatgggacttttcgaatcccccaggctcggctcggactctgaaggagtgctatcgccgggccaattagagtctcgattctcctcaacttgggcggaacaatctcctccattgaccgcatcggctacctcggcgcctttgttgcaatatcaatttggacagcatagttttgatagcccatcatatctgggttcgatagatcagacatccggcctcagatcactgtctgcctttgcattccatacaaaccccgtgtcgcagccagtctcatacatgcgccaccctgtagatgtttccaaccactgctcgggtccatctatctcgcactctcgtgatgaagagcatctttctcaagggtcatatgatgaccggggcatgcatcttggcgctcggtctaggacagggcaaaacagatcctcaaacagcccgcaggatactaccggtcttatgcttttcgatccacgcagagtgtcgattgctgaaagtgatgcaatctcgtctccgaggctccacgagacaaccagcaacatgggctctgtacatgactatcacaatgggttgactccggatcatcaggcatcggcggagagcaatcatgaagccgatcaaacatcccacgagtcttcaatcgcccggagcaaatggcaaacatatctgaatagtgtaaccgacaattatggattggattctgggcgccctgatcaggatctgaccttcaacaacgaccatgccgccatagatatcaattatgcgttagacctgatcagttctcggtggcgcaacgaggagtccaaagcctctcaacctgaccccgtaccacaggtccagttttgtagtggttactatgcttcgccagtacccatcaatgtcccgaggtacttatctccgcttccgtcgtcgctgctggagaaccccatcaatctgatgtacttccatcatttcttgaatcacactgctcgaatgcttgtcccacacaactgcgataataatccgtttatttcggttttgccatcaagtgagttataccactctatgttctgttatccttcagaaagctaaccgaacagtggcaatcggtgattccaatctcctcaatttgctgcttgcatactccgctagtcatcgtgctcgctacctcggtcatcccgagcccgccaatcgaatcgctcattgggttagcaaggtcttcccaacattgcgtatggcattggagtcatccaaggaagacatcactgacagccacttggccacggccattatgctgttgtcattgaagatcgtttctccaaggacattcgaggtgccgatcacctggaagagtcacctcaagcttgctcgcgatttgttccttgcacgaagcgagggaatggcgcatcccgggaacaggattggagcgttcttcgcccgctggctaggctatctcgacacgatgggatctttgtcatgtcgccaagctggtcctccactaatgatataccactccatcttaacggcctgctccgcgcctgacggtcatgacgaattcggtgttgattgcttcactgggttcaccccccgcactggagtatttctgatccgtcttgcacagctggtgcaggaatgtgacaatcaactcttcgacgaaatgggtaatttccggcatgactggcatgcatctgcggaaatggtcctggaagcgcaatctgtacttggtgttgtcgatgggattagcgaacgtgctcatactagcccggaacatcatcatggtgttgagtcctcggatatgatagccatcgaggaagctttccggtttgcaggtctcctgcatctccatcgtcgtgtccttgggtctccgcgtgactcgtttcccgtgaaggaggttttgcgcaagctgattgatgcccttggacgtatgcgccctggtgcagctactgaagtctgctccttgttcccgctcttcacggctggttgcgaatctagagatccagttcaaaggtctcagcttttggaccggttctttgtattggagagttcgggcatgaaacaggtacgcttctatactagtctgaaattcgttgaaagagtttgctgacactgtattcactagattcaaaatgcacgtcaattgatgcaacactgctgggatgaagacctgccttgggtggccctagctagcggtcagttcctaggttagagtcgctttcggtttgaacaagtgggtggactacgttgattcgcagacgccatgtgctcatgtctggcaatgacctgagctgggatgaagcattatttagtatgaagatgtgatagattaataatacccctcgccttctaaaagagcgagatacctaccgtgcgatgcacttcatcgtttgccgtttggcggattatcctacaccttccggccttccactatatataaacgttactatcctcttcttgtgccggaaatgaatcataatgttcattctacaactgactagcttcttgcattacacaagccagaagtcgaaattgcacagagcaattagttctaacttaacttatatccctaggatatcaaatagactacagtattgtccgatatatgccaagatcgaaatctacgactccgcagcggggtgatggtgatcccccagcttctccacaccaagccagttcagccgcggcttacaatgtaggctctgttgaagaatatagccggagatggtgtataagagtgcgcacttaagatcactatatctcttgagcaagaacggtatacttcccaatagccatcatgatctccgatcccagccccattgagcttccatcttcttacgaaaaggttgaaacaaccggccatgttgttgtctctcactaccccccaggcacgccggcagtgaccccagttgtcatcgttactctgaatcgtcctgctaaacataatgcgttcaccccgcaaatggtcttggacttcgagaggctcttccccatgttcgatgtcgacgagcgcgtgaaagttgtcatcctgacaggcgcgggaaagacattttgcgctggtgcagaccttgatattggtttcggtggtggtaaaggcaggacggtagaccatcgtgatgggtaagaggacatccaccagacagcccgccgcatgctctatactcttgctaaaaaaaccccccgacacagcggtggaagagtctcactggcaatccatagatgccgcaagcccacaattgcagcaatgcaaggctcagccgtcggagtcgggatgaccatgacccttccagcaatcatccggtagatcaaccacatcccgaaaacgattccagaccccttttatttaacatacatcccttctaggattggctatgaaaaaggaaaatacggcttcgtcttcgcccgccgaggtataactctagagtcatgctcttcgtacttcctcccccgtctagtcggttactccaatgccagctacctcgtcagcacgggggcagtcttcccccctacatccaagcactttggcgacctcttcaatgagatcctccccgagccatcgcaggtcctgccgcgcgctctcgagctagccactgatattgctgagaatgtgagcccagcttcgtcgtatctcaatcgggcgcttatgtggcgcgactctggttcggcggaggctgctcatctcgtcgagtcgcgagtcatcaaccatatgtttggatcggagtaagtgagatatatatgaacaagctggttgcggatacttaatatcagacagagaccagaaggagggtgttgcggcgttctttgggaagcgaaagccgaacttcaaggctaaccttgatgataacccgccgccgagtgtgccgtggtggacagaggttgatactggccgtaggcctaaagcccaaaggccttcgaagctttaaatccaaagctgtcattggaaaggtaaataatgactgaggatagcgctttcagggttcgtttaattcacacaagaccttcgaaggatggaagtctcaacaaatgtcacgaaaaatagctataaattgaccgtgttatcaaaggtcgttcctaatacattgcaattccccagctaccaagaccgctaatgatattgtaacaaaataaacaccagcccggacaaaaaaaaaagtcaccagatgtggttttgaacagaagctccaagaggttccaccatatattgacacgaacaaaaaagaaatgctgcaatatcacaagagcgaaaagagagaaagaaagagtctacgcaatgaagttgcggcgcttgcggttgtatgccctctgatctttcagccagtttcggtagcccgccacgctaccaatcttctcgccgtagtaatcgggaacagggttggcgatggagttggttgatggatcaacacggaaccggcgaatacgatcaaagaactctttctctttctgcgcaacgaaaacaaaacacattagcacagaccagacataagtcgccactcgtttgctttgcaatgactcaccgtgttgacagagggcttgtacttcctgtacacaagtccccaaatcccatttccgagagccggtcccagaagccaaccgacagcaccgcatgcagcggtcgccaatcccaggacaacaaatgggtcgaggcccataactgtggcgccgagatgttcaaggtcctggccagacagaatctgcacaccgacagtggtgctgatagcagagctggcaactgaggagacgagagagtatcggcggcgggaagcgcggagcttgaagaaggtgtcccagtcgagcttgacttcgtcgttggcaggtgttgaggtcgaatttgcgcgcacagcaatggttgatggcaacgcagccttggcttgtggccggaagtctaggttcaatgttgcggcggccgggcgagttgtcgtggagctaagacgtgtgggctgtttggccatccgggcagttgtctggggaaggggacggagggcgctggcgagcgagggcgcagcggggtttagtcggccaaagaacatggctgtgcggatggacatgctgataggattggcgttcattttggggaggaattggaattgatctaattgcagattccttgcagaggtgaagtgagaattggagccctggccctggaggtggagccgggttatgtaagcgtaatgggcccgcctaagggcgaccgacatcatcacgatctgatctatcatctgttaaactacttgcagtagatggagattataatgggccaagattacaggagagaaattgaggacgaagagaaagattgattcttcaaaacacaatgagctatttatagccatttgaggcccggtatgtcaagtattcttcgaggctaaatatcctgtttgacagaacgcagaatcatggcagttattggtttgatgagaccaaaattgtcgaatcacggcagagcaaattggcctcccactcaaagaggagataatagctgatgtagggtatcgcactctgattgagattcgagctttttgagcctcaaagcaccacatcgaagaaacactatcgcaatgtcacttgtccctggttcaagttggatgcagcatcatgtcaagtcactagtgaggtgtagtgaataggtagccagacgatattgacgaggcgcccgagaggcaggtcagtaggctatatgcatattctttgaagatgtcgggtgtataaggtaatataggcagtgcgatatataagtgtacttttgacccggggactggcaaagagatgctatctatatttgatggttacaaagaggagtggacaggtcggagtttcacaatccacctagaaggcttagcttggtttatatacaccggttaacacaggcctagttcatgaggcagaaatggtgaacaaataagagaatgagaccatttttgtccctgaacctggaaaagaccggaagtgttgaactgtaaacaatacatggactgcttttaccaggctatagtcttttaatggccagggcatgtgtcagaatgggccgtctgccagcttggcttctactgttatattcacggaatggtgtgaaggctggtcgtccactggtcaggttgtggcgagcatatcagaattccaatcatggccagctttattccaccgagtcaatataagtctattttcctattcgattagagttctccccggatcgacatagtaagaggctgaaatggtgcgcagctcgtttaccgaatacgttatagattcagctgaataaaggtagataaggaggagagaaagaggaggagaagaaaaggaaaagagaagaaagaggggggaaggtatcacctcggcaacggatatttactcacgcgttagtcaaagggttcgtccggcgtactggttattccgtgctgaaagctttacaatacactgtatcctggggcctgaaagcggtcagtgttaaggctaacattaggccaaattaaggccaaattcaggtactaaggccacaatatactacattaaatccgaaagtaaccctggcacctatgcccctgggtagtctgggtatactccattgtaaaatattcagcaaaacccgtggaaaaatcctttgttcctggttgcacacgctaatgcagactaatggtctgagagtgttttcgtttgaccaatagccgaaatgcctcagcgatcgggctagcggcggggtttcctgcccaggtgccaatagggctgttaaaatcacttgaaatttaaaaatatcgtttcaatttcaatttcaacgctaaaatattatttcatttcaaaatcggtctatgcctcaggcatggacccactcttagtagtccaccaattagataccttaatttttcagagagccaataagattatcatagcttactctaagcctaattaggccgaatacaggctcttacctacaccgcctagtattcttcttagaccgcctacgcttatgtagcgctagtccgctagaccacgtagagtgcaatgtataggtcaaaaatatatctctggtaatctaggtaagaaaatgctccctgtagcccctatatccggccaccccgtcctacttcaggcactcttatacaaggccgaactatataccgacgacatctaattatcctaccctatatctatagaagacttacagtcaaagagtcgctctgagtaccactatcgccagtaccaccatcgctagtactaccatcgctaacactactatcgctagccctactaccgccagtaccacttcccttactactatcggtactaccggtaggactatagggactattattattatcattactctagtcgtcactcttactatcttaatggtttagcgggtttgtaaagggactgtgtcgctatacgcgaggactagcctctgaataatctatagggcggtatacacagtagaatttccttccctattgttacctaaagcgggtattacagctagcgatacctttaagtcggtcatagaaccagtctactgaggtatagttacctctatagctaggcttaagcgcgaaacgcagtcgatgctattgcctcgaaatcactaggcgtataatcgcattcttacctataacgattctactgtattcccttcggcctatcgttagtagctcgaagtacccagtatagaaggtccggaaatgccgatatatagcggataggttattgtatactatactatatatcatatcgctatcgctagtaataaccgggcagataccctagttaactttattctatttaagtattgggttcggcggtctattactagaagtaagggtaagcctaagctctctagataagactttaggcggacgttatcctacgcctaggcggagttagtagacggctagcttctaacctaggttagggtcttatactaggcctatatatattcagtatatattaggaagatataaggtttttgacttactataggtgtatccctatactggataagggtttacagcattccagactttatttgaagtaaacgcgcgataggaatagctatcggtagactagaagactagaagggctactatttttataaagataagatatacttaaacttaaagactaagaaaattttagaggacttagaggatagagattctagagtagaaaggagagggtttataactattctattaataaagaagtattccttctacccttctaagggtatttaggaatatcgctttctattaccttcctaataaagaagaggtctatatagaattctttagttctttagttctttcttatatataatactaatattataaagatactcctataataagaatctccctttattactatctaaccgtttttagactattagttataagcgactgtactaggatatttttataaaggagagttagaataatattaataacttttctaataggttgatctctaggtttaggataaagtactttaggtatcttagcgcgaagatactttatagaatacttagaggatagagtggttagtattttttattttttccttatagcctaggtcctacagttaggtagctaactctacccctaattctattatagatctaggttaaatataacttctactctgtatcctattctagaaatactatataaattatcgactatctaaggggaaagtataagtaaatccctactgagatccgtataatctttattaaagaaatgaagaaaggtaaaatagcttaaggacctattagcttttaaggttagggcagctatagccttaggaaataaagggataacgctctagctagatagctttactagtctagctagctattcttacttatagataacccgggcttctaggaattctatttacttatagatagtacttataagctacctactcgctaagctatcggtactaaactcctcgataaacagtttattagcctttagaataaggttaatataagattaaagataatacagtacctcaatcttacctataataagtcgaccgataaaagtagataccgaatctttaatatcttattcagttctcggtcctatagtatctattactatagagtcgagattaaggatataagtataataggggaggaagttactagcctagtctttaagaaggtataggaatacctaatctaagaaggtaataggttacctaattagttctatattaactctctagctatagatatatacaaggtaatgaatgtctactaccgactactcggaatataacctaagataagttatatattttatatcctatataacttgtacagcttccagctccttctaaaggatatcctcctgagaagtgggattaaaagtacatttaagatagtatcagagattgtattattctttaactcagtacctctacaactaaatcgacttcggaaacactaggtcgaaatctactataagacgtccgcgctcctagtgtctataataatacaatagggctcgcaatttaagatactccgcttagttcttaaatgccggtaggccctcgagcgctaggcccttaatattaaaaaggacgataggggtagagggaaaaaagccttaattgcctctaccctattagaacctaccttttaggcggatctcgataagttaatccaactcctagagctaatctataaggcacagcttatatccgaaagctaggtatccgatcttataaaagtaagtctattatatacaaagtctatatataatatatacgaagtctatgtataatatatataaagtatatataaaacctttattagcctttattctaataaagataggttatttcttaatagattttaatccaggagtaccttaagacctatatattaatgtcgaaatttcgactaattatataggaatacctagaggataaaagcctaaatggatttaaacatcgatttaaccgataaattaagccaatctactggcttacattttatcttcggctatcgacagctatctaggatctatcctttcccccggtactttaagagccaataaatacacttatcttaaagtataggggagagcctactaaaaagcagttctagcaattttagaactggtaatagcgttttttccatgctgataacggtggtatctagtctaaccaggacctagaggacttctagtataaggcgaaagtattcgctccttagcttactaatcttgccttacgtatctataatactacggctaatttagttgcctcggagtgggcattttccgctataaactttgtttactcgaaggtacgcaattcgctttcacccaagaaggttgataagctagtctatctccggataaactatcgacttatgagtaaagggcctatccagcagcctgacccagaaaaggtataggattagatagaccggtttgatgaggagtagattatcagaaatcgcttcttccgggatatgacttctcttaagcctcagactgaaagccttagtctaggaaatgagctttctgactctgagtctactgatgggggtaggtgtattataatgagtgtaaagcgtccttatgacttgtgtaactaaaaatttactgccagtttttctgccttttttttctgcctatcagctagtaatacctttaaatcggttatagaaccagcctactgaggtatagttacctctacagctaggcttaagcgcgaaacgcagtcgatgctattaccttaaaatcactaggtatataatcgtattcttacctgtaagataaggagtagattattagaaatcgcttcttctaggatatgacttctcttaagccttagactgaaagccttagtctaggaaatgagctttctgactctgagtctactaataggggtaggtatattataataagtgtaaagcgtccttataacttgtgtaactaaaaatttactgctagtttttctgccttttttttctgcttatattacaaaacattaccaatatattactagcgccttagcgtgaaacaattgaaattatattttaaatttcatgaaaattaaaaatataatttcaattcaagattttgaaattcaatttaacagccctaggctgaaaggcgttaaagaccgaacagactctgacctcattggcttagcgcggaaataagtgcagatatatatatgagcttatagatagagcatatagaatatagaactttggagtataaaatacatagacatcggatattggatagagataactaacaacataccctattaggtacgcgaaaaaaaaaaagtctgtcgtcatttggctaattgcgaatttctccccaccacagcttccttttccccgtctcgacttgccgcattcgaacttccccaattccccaactcaccaattttatcctcttattccgtctacaccatgtcaaggaacatttcttacggccgcggaggcgcaggtaagtgacaccacccttcatctctcgccacacaagtccactaaccacactacgcccatgccctaggcaacataacccgggaacaaaaagcgcccgaacccaaagacttcatcacaccaacaatcaagcaagaagtctacacgacaggtcgcggcggctcgggaaacatggtacacaacgatccggagcgaccagagattgcgcgcgagagccaagacgttgagtcaccgcccctgcgcgctcagcagatcccccaccacacaggccgaggtatgttctgcagatgacagtatatggagcgaatgcatttttgcaaggtcgtgacaggtacagctccgctaacggatgtgctatttctttccataggtggcgcggcaaacgcttacatccccacccctgaagaggaagagcgcgagaagaagatccaggagcaggaggcggagcttattcgcgtgcgcacgcagtccaaggaccgtgttagggagatcggacaggagaggcaggagctgcggaaggagtcgccttcttcttaggttggttaccgggggtggactttggttcgcggttgattcgttctcgttaagagggctcgatgaaagctgatggtattggctgcggaggagatttgcctttcttgggctgcagtgccgatctggtaagaggtgatttgtccgagcagaaacgaatcagaaccactgcgggcagtgctgcttcgatgcgagggtctgtttttttgccccatcgacctaccggttggacttatgggtctgtggtatttgcttttctttcttttcttttcttttctttgcgcggctttcccaatcggctttcccggcttcacataatagggaattgcttcatcatacctatcgtggaataccgggagaggaacggcgcttgggatacatttgggcgggttgtgttttccctctttgacatacgtttcgatgtgtattgcaacgatcctctgtgtttttcggaattgcttcctaaacaccgagaaatgataaactcccatgacaagcgatccttgcctcaattgaagaaactatgctatgtacaccaaatgtttatgctaattatacgcttcgtgtctcattagatgcatcgctcagcccaaccaagcctttgaaagagggcaccaaagaataaaattgcagactcgccatcaacagctaagcgagcactcgcgcgtcaatcctcggaaggaaacaccccgtcgcatcaatcggccagtttataagatcttgccagttcggatcaagaatgtccccaatctcctgcagaatcctatttccccaatcgcccatccaccatgaactcctaagattatgcagaataaccacataatgcgccagaacaacaagcgcaaacggccggcgcaactcgagtagctccagaaactccgcagggatacggaaactccaccaaaacgcaaagaccttgggctcgccgcccttcatcagcagcccgagcgcgtggctgagatgttcaatggccgagtcatacagatccgtctcgtgcgtcacatcccgcatagcctccaagttattctgtcgctgtagcgagaggatcactagccgcgacatgtccggcattgttgggagcgggtcttcggggtggaagagcgggtccagctcgctcgccgtgatgcgttccatcgaggccactaggatgctgactagccaccgggtcagctggaatacctcgaagaactcatccagcacgtcgggctggtcttcgtccgagtcggtttcgctgtcgatctggcagaagccgaaggtgaatacaatcattatgcaacacagtgcgaaggtcgcttggatttcttcttccggggcgtcttcggcactctcgatgccgaggcctgctagcgcctgcgcttggtacgagcgtgctgtttcaagatatcgccagcgccgggaagatgtactggttgaggcgaggtgcagtgccgagagggctaggataccttggcgaaggcctgtgtagcggagagaaagctgggggatagttgtttgccatattcgttcggaggtggggttcccagccatggatttgtaggttgttgtgcaccagtgcatcatcaattcgaggtctttcaggtgaagggtttcttcggtgtgggttgagagacatggtgggtgctcttgtggctgggaatttgactgtgaggttgaggaagtcggagatgatggcgaagtgctagttgaggggataaaagagccatgcttgttgtctagccgagtcagtcggggccgaggcggatattggctgagcatcttgcgatccaggcagtgcacacaggtcgagctctgctccttatactgtgagagttgcattagcggggaggtgcgagagataggaaacaaaggagaaactggacgctccagtctcattatcaattgaaagctctgagaaaggcccagaagccctaagcaggggtatcatactttaacgcgtcggtcactttgcatactcgtctggcgtcgcttatttgaccaggaggatttcgattcgcataattgcattgtaaaggtgccaggctcgagacctcgaatgtttattcgattcgggggttgctgtgtatttgactcataattcaacctccagggatcccccgaaggaggaggaagaaggattttctgagatcatgaaaaagtcatatcagtcataggcccaagcggtgggtgtcgatattttgatatgtccattttcagtgccaagtcggcattccaagcaccaaagaggtaaaagtggcgttgtttcctaaatcggtaaatgcaggatggctcgtgcttcaaatgacataatcatacccggcgggggccgtacttcgtcactccgatggatttggtatgtttaggagtacggactactacagagtacatattgcttaataaataattgagcacatagttagttagcaactaactacctaagtaatcagctcttgtatccaacattggaacctaggtccgatccctattgccaactcaaaactaacttccgatcttctcgtattccatattccaaaccgggtgtgaaaattactaatgcgcgatatacccgagactctatcctagaagagcatacgcaagctagatcccgctagatgcactactagcagcattttaatatggaaaaataaacgaaagacctcggacaaaccccactaagccccaccagcccctagaaagagtccacactagaccctcttcgggactagccctatggggccggccaagtctatccgaaataagtttcagttgacaagcgatgcttttccccgatcggggaaagcgcatgcgcttgaacccctgtcccatgcactttatgcatggacacaatctcgggtacgtatctttctagctcgtgatctctccatgccctaagctcctttccgattagcaccgtttcgccgtggctccttggacggctggtttcttctttgggaacgggaacgttgtccagggttggttgtcgcaagtcatttccatagtcggacaattcctgaatggaagcattgcaagggttagattgtattcgtcgatcggatttgctttgcttttactgattacagtcaatggagccctttaaggtgattactgcgccacttcctaggccccgagatgctagctcgcacgcaatctggccctgtcgggctgatttgcgatccgcttagccgcgaagcattttctttgtttgggcttggggaccctgccgactggggttgctttagcgttgttgagtaaatggcgtgatgatcatgattcttgctgttgactgaactcggagacgcgcatggctagcgtagaccgacttttgggatttgacttcggcgtcccgactcgggtttaatgattacgaaattccccggattcacgctagtcgttgtggatctcctcgggtttatcaagcgagcagttgttgtgtccgaacactaatagattgggcatttgacaagtgactcctaatgtagtagcccgcatttcgcgctgataactacagtccgccaataagcgcattctgctgtccgggtggcgtcgatcttagggtgctgagtgccagttcatcggtattctagatctgaccgaggacacgatgtgatgccacgtcgaatgtcatctggcactgaccctttttggtaactgcgcgaggtccgcacgggtagaagcaatagtagctgcattagaacaagggtccagttagctagccggatagccggtgactccgacggacgattcgatatctccgtttcagaaatcgattatctgatcgcttaggcttactgcaatgtgcgaaacagaagcggaactccgcggagtgatgtgatcgccaaatcctgcacataatccccatccctggtgataacacttttagggaaattcccggcgattaccacttggttgcctgccaaggtgaggggggtgatccctgcttccttgtttttgcgttgatatcgaaccccaggcctcactttccgacctgagacttgagagatactggtcctgatgataccagcagtgccacttgatgtgtttggcatgctgcaggacaaaaggcgtaattcatagggttcgtgcatccttccgctcaaatttgtatcaagtgtcattggtctgcacaccgatgttgggctggatactgcgagattgaagtacggtggcggtctggccagcagacacattttcatatccttgggttcttcgcagtggcttttcgacggggcgtatatgtgtatcatttttaggtgtatacgtgccaggtctctaccactgagaatggtaattcggagggcatatttctgatacactgcacaccatcatgactgagattgctgttggtaccacctgaaaccctgagtcgaaaaagtgcaaaatcatctgggggcagacaggtgtaatagtatcgtaagcggaaacaaactaacaggttagcagcatttctcaaatcatccgaagggtaggtacagtatgaaatttggatttgtggctgatgtcttgctatagatcgcaacgtcggggcgaccaatatagaccagccgatcgtcgaggccgtagctccaggctgtttgttagaggaatcagaggaaagataaagggtagtgttggccagttcgtgccgtaatagttgccatacggttggccgtgtaacacaacttggctgacgcctcccgcgatggcacgatcgactgacaaagatgcctcgggggaaagtcgtgtgacttcactccaatatcacgacgtctattttaggaaataacccaccttcatgcgagattttggcccggggaattggcgatggtcttcagagcgcttctatcggggagcgagggcatcgacatcgacgataggatcacatataagactaaagactgctgccaatgccaatgagaatagtaatataaaatccctactaaggccaagaactagcccggcgaaagcctaacgtgggcctactacggaaagagcacgactacaacatctgctcctatccaaagtccccatcgagcggcacgcccgcttacttgcgaacagttgaggccagccgtgcgctgtaggattatgttgccgctcttctagaggcagttctttgccgagcgaaggatgacctgtggtttgggtagcttgcgctggcctcacgcacggcgtacctcttgaagatgacgtcgctgcctgcgtactcgaggacaggtcgatgagcatttcgacatacccaggtttaaagtgtagaaaaaacgtcggattgttgtcttagatctatagctgattctcacatgacccgaccgcaatattactgcatctcctttgacagttcagaggtcatgcgtgaatccgaccactttagtcaaatacacttggcgtgcgagtcggttagatgatagactgccattagcgatgaagctttgctaataggccggtagctgtggagagtaagcccccagtcgggggtcgggtggcgcagaagaagccccacaaggattggccattggcatttgcaactgcagtatgttgtagtattgtacaatgttgtctgtgtggacatcaccttgagatggaagcctcgtacctttcgtggagtgactactgaatcggccgcttatcccagctatgatcgataccagagtagatctcaattggactcgagtacctgcagcgactgtcacggtaatgccgacgactgatacaggtagttttgggtgagatggggtgtccacgacttggctgagacggtgaagatggaatggaggtgtaggaggttggtgacggtgctgagttgggtaccactccggggaacgtgcacgccaacagattaaacgccacacgtcgacacgagcagacagaattgaatcattgcttaggattagttctgttggtcaattgattctgatctagactcaaggagatagcagaaagatcatcgaggtatagtcggagtataaaataaaaaataatctcctggcgtctatttgtagttccgagagaatatctggccactgtcgaggtcatcagagtatgtacttttctaaatatctattcgctttatactagttattccaacatttattatgttccaaggtcaaaagttccaaggtcaaatgttcaaagtcgaaaatttccgtttgcgggttatatgaagaattccgaatgcggactcaaatttcgtcccattcgtcagttgtaacccgacggtttgggtggttcctgcagacaacttgtaacctcgtcgacacctcgaggacatctcttttttgtcttctttttctcttcggtcttcgcttggaaatacttttccagtttcctatttccggtacgtgatatatgggatatgtgtgagccgtggaagcctcagcgaatctcccgcactttgacagcgtcatcgtgcggttgacccaagaaagaagtcttatagaagaagatgatgctaacatatcttctgtcaaagaacaccccaggactctaatatcgccactcccgccctcctccgagttcattctacggttcgcgaataaaactctccgactctttcgcttcgcattttctgcctgcaatcggattcttcacgctttggactgatcggcttggatcggtcttggtacaatcttggtacaaagttcattcaacagacccgctgcgttctcgcgccatttctttgttcagccccggaagtcgatgcttcaagtgtgacgtctgaacatcccgcggggtcgcatgtcgcatctccaaccccccacctctcttctcgaacaaccaggtagtgaagatctatcaaaatagacctataaccccaggaacacgtctttggtctatcaagaatcatcctcggttccttacaatccggtaccatgtacgccgtcgaggatagacatcatcccgtcccagctccgctctcaatggatcgcatctctgctccgaccgtccagtacccgtcaggatccaactcgctgcgccaatccgaccatttggcacccgtgacaaactaccaagatggtcgttcctggtcattacaagtggtgcagcagccgatccgggctcgcatgtgtggatttggcgacaaggtgggtgatttttccgacataattattttaccacctcttaacacacttccaggaccggagacccatcactccaccgccgtgcattcggctcattgtgcgcgatgcgcaaaccgacaaggaaatcgatatcaagtatgtcgaaccagcaactctgcacccctcggctttctaaccatctcctctagtgagatcgatacctcattctacgtgctcaccgtcgacctgtggaatgccgacggtaccaacgaagtaaacctcgtcaagcattccgccacctccccctccatctctaccgccatgtcctcctcataccctcccccgcctcagagtgtctctccgacctacccgggctacaaccagaaccagtaccctgtgggataccccccgcagatgaacaactactacggtggtcagcaggtggcctaccaaaatcaatacggccagccagtaacgtacccccaatactactccggtggtcaaatgccaccgtccatgtcgcccgctgcgcagccggtctctggtggaggtggaccgggtggcatgttcactcgcaatctgatcggaagcctcagcgccagtgctttccggttgacagacccagacaacaaaatcggtgtgtggtttatcttgcaggatttgagtgtgcggacagaaggcactttccggtaagtctggaataacgggggtcacacgacctaatcgctaatcaaaatccagtctgaaaatgagcttcgttgacgtgggtacctcgtctgccgaaactaccaacggtcccccggtcatcaatcacggaaccgcacccgttctagcctcggtgttctccgaacccttccaggtcttctccgccaagaagttccccggtgttattgagagcacccagctcagcaagtgctttgcgctacagggtatcaagatccccattcgcaaggatggagtaaagggcccccgccgaggtggagatggagacgacgatgatgaaggcgactattaaaagagcgatatttgatccatagtacttggctcaacgtattgtctcacctttccttacctttactttttccccgccttgctatgaatacgacatgggggatggtggcgcgtggcttacggtgttctgggcaagactcgggcttgcaggtttctatattgctacacggactggtgctggggggttttctgtttggttttgtttcttccgagtattattcttccccttattcttttgttggcctctggctgtgtctattcatatccttcgcggccgattgcccgcacgtacatacactttttcttttcggtgaatcgaggtccggttgaattgctgaatgccgagactgtctgcccatagaaaaaaaagtcgtttgatatccaatacactgaggttgtttagttatttgtccgggtattgctctaatactcgcctttggtatcaacaggtgtaggtggtttctgtggatcgtagccttgtctcacatggcgttgtataagagtatagtatacatccaatagttgtgggtcaaaatactatatccattcaacatatctcaggtttcagtctcagtctcatgatgctctacagtctaaaatgtctatttccactcaatacttgaatatcaataatatccactacccagtataacctaccatatctcacatgtcttacatgtcatcaaaacagcatgcaatcatcaagaatcatcagcttacccacccatcttccatcaaattctagaagacaaccagcacatcttacacagcacatgatccacaaaggacagcgtagtacaacaaacccatatccgacaacaatctcgacaattcccgcccaccatcggcttacagaatacgtcacaccgtccctgaaagccgaaatacaccggacctgacagaaacccgacaacaccggattgtccaacccgagtctcccaagccatacaccaacctcaacctcaacgaactccctacgtcggacagtgtacaacgcccgtgaaacggaccgacctaagccctctcctgacagattctaatcacccacagccaggaaatcctgacagccctctgcactgcatggtatctgcaaggtaccacactaacacacgaggtctcgggtatgcgcgctgcagcatcgttagatattcttattagatcgcagctggcaggcacaagaccggatttgcatcagggtcttcgatattgccagattagccgcagcaccggcttagtgggctgcagggtccggtgagacattgcatattgctgcaggttcgccggtttaggttgggcgtcggtggcgttggacggtgtgtggttatcctctcggaaacgaggttcctagaattttcttgggaatttgtggatgcgctgatgtatcgggccgttggtgggtcgagggttgtttttctggggaaagtaagaggcgaggtatccatgacgatgaatgagatattagaggggtttgaagaacgaataacgtatgatgtagaggtccttcgtataatatttgcgggttaagccgaccgttgatacctcattggcatggtgatgtggtgattccaattataaactgagacaaaagaagagatcttcacccgaactccccgattcctccaaggttggaatgcagcagataagtatagagtacctgatgtctcagactccatgagaccccgccacctctcggccaaacccgacagtcaatgacggagaagtcccttgatctatgggtttccctggttcggtttctcggatgtgctgctatttatattgccctcccctcgtctatataaagaaaggtacaccctcccttgattgtgactattcaaatcaaaacaaaacatctgttcagctatacaaaacaacctccaaccctccaaccctcaacatccaatccacaatgaagttcacactcacttccctggcactccctctgctggccgccgcggcaccagttacccagtcaactgccaacccacccttcagcgtgatgtccatccgctccggctcgcccatccactacctacagctgaacgccgccggtcagaagttctacctcggcggaagcacggccacctactgcccaacccaggtcacagactgcccaccgggaaaccaaaccgtcctcgctcctggcggcaccgctctggtaagtcacgagttacactatctcatgccaacaaacgtacaaaggaaaaccccctctaacaatgaacaggacaccatggtccccggcggccagcaggtctacatcgatcccaatggcgccctgagcttcacccaggctcactcagccaacatcccgcagggatccttgctcggtccattccactactctgccgatgaaccctgggctcattactccttcggctctactggtttcatggcttgtccagcggaagataaccgctggcaggtgtttgccgccattcaaaatgcgactgtgcccaatggtaatgttgacgagtgtcttgggttctcggctgtcgctctggattacactggggacgtgcctgcttggcagtatatctagattaatgatgtggtggatgcttaatgctctctctaccttgttttgatttcttgcatgtaccattattgactccttctttatcatggtccaggttggatttaataatctaataatctatctcatgcctttcgagttcagaggttgaatggtaaacatttgcatgaagctgtacttcgacacccgccgtaacgggccgaatcgcttcaggaacacccgtacacaaaatctatagtcagactcgaaagtaagttcaagttgatgggattgtgaaagaagtgtaacacttgtctcactttatcttaagctactaggatagaacaaagaatatatcacaagagaagggattgttacaggacccactacaggatacctacaatttgtatataaaccgctaacaaagttaagtcacttttatcacatcaactatttcaacaactatttcaaaaactactccatcatcatcgagagatctttgtttgctagatagctaagcgcgaaggttcgaggtttggaacgtttgcaaagggccagctatataaacaggctgcttcccactttgcaacttccttcttcttcctttcttcatctccattatctcgttagcggcgactttctgctcgccgtgaggcgccatatcgatcaacaagaaagagtaccttcaactaaggcggcttcgctattcttgaggaactgcgcaaaatggatgaatgctgcgatgacagataagatagagaactcaaattaaacaaccaaaaaatcgaagccttccgacagggccatctggatctccgtcaaagggccatctcaacatgggcacgggatgcattgcagaagaataccgaacgactgaaggaagagattcgcagactcaataaggatatcgtccacggtagcgatatacggtctgatgctatggttatcactgaacggtacaaaaaacaagtaccgcgtgaaaatatttccctactctgtacggctttactccagataacgtgaacaacctcggtattatctacaaactcccttggcactctttttattgctaatatgttctagaccaattggaatgtcacgcatccctacgggcctttggatcgagaagcttctatcctacttaaggacgcccgtgtaaggctccccgacgaggggatggagaacaaacgcgtgcagcttgttggcctactgctaaaggagaagtatgagaaggccgaggagatgagcagtactctgtgtgggaacgattgatttattgccaaagagtagtctgagaactaactttcttaagaaacctttctgatcatagttactacacaagaagtattacttaagaagtaaaaggctagtcactcctaggaagggtaataatctcaaataagaattatttgattcaagggggcagccagtgtaacacttgtctcactttatcacattaagctactagaccctccccgcctacgctgtctcatggggtcgagagggatgagaaaaagaagcgcttttatattgtcacctcctacgtgccttcccctacgaagtgactgttagggtacaataatctagatgttgtctacagtagagctctatagtgaacaaagccgtcaatacgcaacaattatattcatgaaaatgcaactaagtaacataaagggcgtctgcttgtggcctatgccccaggcaataggcagaacagggttcatcaatcaatccacacacttaaaaccaccatctaactatatttgcaagatctagtccgagcgggaacacctctcggagttcctatgactcccttttttatccaggccattgaccacggtatgcagtagcagccttgggatctccactgagtagataagcctatacacttatgatgtgaatcgaacccacggagggttgacttgggggttgaggcacccatgactccctcaactcgagggtacccacgaggtgctattgctaacatccgcatgtgggacattgtgctcgtcttggatgcatatcagacggcaaagacctgtaccagactagctgtctgttaagagcatgttttgggcttggggttttggactagatctagttccgccagatcttaatcgccttgtctttacctccactggcgatcttttgtccatcaggactccagtcgacagcaaacacctcatccttgtgtcctggaaggtccatcttgagcttgccggtgcgcaggtcccagatcttgagagtggtatccttagatgaggacactagcatccgcgaatctgccgagaaacagcactggtagactgcgcctacatggccgcggaaggtggtgatgaatctagggcgatgttagctataaatcattatactcaaaggactgaaacactcactttccatcacggccgttccacagcttgacgtggttgtcaaatccggctgaggcgatataagccatgtccggcgagaacgtgacatggtttacctccttttggtggcccagcatccgcgcgacaggcttgctcgaagtggacggctcccacagatacattgtgaaatcgtcactggccgataccaatcgctcgacaatagtgttgttcaccgtcgccgcctcctcgaacttcttgcgcgcagcagccaccttctcagcctcggtcacagggaccttgccagtgtggtcgtggtaggcggtgcgaagagcaaagtccgtcgatagcgcgaggtgattgacgcggtgggcatgcgccgccagagtctggagcagagtgccgtctttcgggttccagatcttaatggtcttgtcgtgggacgcagtgtagatcttgccagtaccaccccatcgcacacaagtaacagacgacttgtggccggtgagcacatgatcagttactctcgagacaacatcccacacgcgcaccgtcgagtccttggaggcggatgccaggcgcggccgccctgactcctgcacgtggtatggctcccaggccaaattcgtgatccactttgcgtggcccttgagccccgcacctagtgctgtcccctgctttgcatcccagaacctcacggtgttgtccatgctaccggtcgcgatcatggcaccgttcggcgagtatgcgactgccagcacccagctggtgtggcccttgagcgtatgtttcggagttccagtatcacagtcccaaacacgagcagttgagtctccactcccggagaccatggtggaggaagatactggggagaaggatgttgctagaattgcttcgccatggcctgcgatggaggccgcgcatcgtgaaacggctttcactcggaaaaccgcctgcggtgtgtagaagagcgataccgtatcttcggtggacttgatcccagtctggagtagcgagtggtaaacgtcgcggagaatgtcgatcgtttgttcctctttttcggaatggtaggcgaatcggtatggtactcgcccatcatcttcctggaaagaaatcgacgtcagtacaacatccaattgccaagaagtcacgagattcaaatcttacatttccttgtaatgtgttgaggagagtctccaggttcttcacattggcatcggcgactgggaccgagaccgcaggcccggtgggctggccggttgcttggtcgaagaattgaacgcgaacactacccagatcggacggaatactctcaatttcttgctgctcacgggccttatcagcctgaacgagcttttggcgcttgctgggaggaggatagagggttgacatggtgattgattttgaggtcgatgggggaagaagagaaatttcgacaagcaaaaatatcttgacgcttatcttatcggccctatcgatggatctactcgtacctggtacctacatacggaggacataagataactataactatatagttgactagttggttaactaagtagaggaaacaatcttaatcattataatcaaataaaacgacactggaaaccttcagatttatgtataggagggttactggtcacgaaagaagtgttggtaccctcggggccctggcttagtatcacatgagccctcaacccgtggactggaaccccggcctctaggcacaccctgccccatctatctacactctcttggccattagaattgagcttcacaatgtcggtttattcattaaattcattaaattctctggattcctttcccccatcggcctctagatgtacaagtaaacgtccgaccacaagggccagcagtgttgcacaggagatcatctgcgctgtcagtgagtcgcggggcgtctcaaccaccgttggcctcgcatttatcaaccttgcgacagctgaatctgtgatctgtcagatatgtgacagccagacttacgtcaaaacaatcatcaagataggtgtttttgaacccaacgagatcctgttcatgaacaccgccaaagagtcgaagctccgttatatcatcgaagagaatctgccagatcccatcttaaccttcctggatcgcaggtggtggtctgaaaagacaggccacgagtatgtggaacggctggcttgtctacaggaagtcgggtcactcaagctgactctgggcgggaactatttcgcagcgtgttgttttgccgcagtatgaacactattcatgctgccgaaagaacgtacttacataaaaattaggtccttaagtatgttgaagtcgaactccagcaatcctttaccacgcattctcttcggatacgcttccagccgtccgaggggtccatgttaattgatttgtcgactattgtgtccctcgaactcatccaaaacctgcaaaaggcgaagtccaaggaaagtttgtttggactactgaacgagacattgacgcctatgggggccagactactccgagctagcatcttacagccttcgacagaacgagtcaagttgacagccagatacaatgccgtggaagatctggccactaaagaggatatgtttgtgtctgtgaggcaggcgctcaaaggctttatcgatgcagataaagtattgactgcggtagagtctctgaggctagctagtattgaagactcgtgctgacggattatcaagatcatcttggttcccatcaagcggacaatctaccatgtcgaacagtcagtcaacactatcatcatgctcaagacttacgtatctgcgatcaaacacatcttccaggcgcttggagcagcagaaagcgatctactacttaccatacgcgaagtagactctacgttcgtttggtattttactcgaactaatgcattttagttgtgcgctcctgaggggcatcgttcaattgaggagctgattgacagaactctgaatgagcatgtagcctaccagtcaaagccacttgatctgagaaaccagcgcatttactgtgtcaaggtcagaactctacttctacattggatacagatcgctaacatgaattaggccggagttaacagtctccttgatgttgcgaggcaagcatataaagaagcgaatgcggacgccacagagatgattgagagattatcaggcatgtctggaattatggcatttcatggatcattctgacctatatcagagaattgcgatatggtcttagatttgaagtatgacacagcccggcaatactacatctgtattcctgctacggaactaggtccgctgccggatgtttttatcaacgtgtaccgcaagcgaaaccgcattgaatgtcagacattggatttggtcaagctcaatcaaaagatcaccgattcccacaacgaggtgatcaatatgagcgaccagacgatccaggacctgatccgagatgtgtccgccgaagtatccgggctttttcgagtcagtgaagcaattgcaatactagacatgcttggatcattcgctcagctagcaacaaaatatgagtacatcagaccagagctaaccgatactctcgccatcaaggcggcacgtcatccgatccgagaacagattcatcgcagcaagttcgtgccgaacgacgcatatgcaacaccgcaaacaagattccagatcatcacaggttgcaacatgagcggcaagtcgacctacatccgctcactagccctggtcacagtcatggcgcagataggctgcttcgtcccagctcaatacgcctctttcccaatctttcaccagcttttcgcccgcgtctccacggtagatgatctaaccgccaacgtctccaccttcgcggcagagatgcgggagatggcattcatccttcgtaacattcagccacgcagtatggtcatcatcgacgagttaggccgcggcactagcacaatcgacggcctcgccatcgctatcgcgctagcagaagcactcatctgtagtaaggccatggtctggtttgtcacgcacttccaccacctgccacagattctcgcgaagcgcagcggtgtgatcaatctccacttggcagcagacatttctcccgatgaatccaagatgaccatgcattaccgcattgcagagggtcctgttccagaacgtcgatatgggcttgtgcttgccaagctcgccgacctcccacctgccgtcatggataaagcacactccgtgtcagaggcaatggaccacctggctaatcgtaggaacagcccggggcgtgctggtgctatttccctgaagcggaagttgcttttgtctctacgtgaacaattacttctcatccgtgccggtacaaaggacggtacaatggataacaatagtcttcgggatacattgattaaactccaggatgactttgcgatgcgcatgactgccatcaacagagaaatggagttatgccccgatgatgaaaccaagacagagcctcttagtgggactacttccaacttgtcagttcatgcacctgaaacccaagcgtcgggttcaagcaagagtgacaagggaatgcgggtgtcggagcccattgtcattgaatctgagtcggattctgggcctgacgataccacggacaatgatagtgtggtgttgattgaatgttgaagttaaggaggatggtaagtgaactgacctctttattatccccattcctgtagatcatatatgtatacttttatggtgacaatctgatgatttgacggggaattgaaaaccacattattccctaatatatgatatcagacacatgaagtgacaataacatggattacctctatacaatacattgtatctgcattcgctagtaggtacaacacagaagaacaagaaatctacccctacatggtatatattttaatggcgctccccgccatgcgatagccaacccaacttaggccaaatcaaggccaaatcaacataagaaacatgaatcaatctaaaagtgacagtgtatcaaccgaagtggaacagggtttgctttcccttgttcctctttccttttttgccattacttgagtcgtcattgctgggttcggccggagaggcggttccggaactcggggctgagccccatgcgttcggggcagggccgcggttatcattccaacggacggtgccgcgagtcttgccagccatgaggacattgggcttggctgctgcggggagagcagggaaggaatcagcgccgcgagaggcgggcgccgtgggcgtgcgactagaggatggtgcggcggatgagggccggctgaccgggctaggcatcgcaggacgagagaaggatggcggcggggcggctgctgcccaaggggtggcagcggaaggtttgccacggcgagaggaggggccagctgaggcagagaggggagggaaggggttggagggggcgtttgggagagcaccgctccttcctacggcggagcgggaggatttagcagttgatgacttcaagcgcaggacgcgcttgccgctagagttgacggcgcctgttgacattccaggtaagagaccaccggctggaagggctggatagtcctcgttgatggcacgccagtcattccaggctcgcaggagatcggagcgcttagacgcgtcttcgtagatctcagcgagctccttgatgagcttgcccagctcggtgctagatgtatcgaataacgagaagaaggcatcgatgagctcggttgccgagatcgaagaagcgcggtagcttgatactctactacggaattcggcgagtttggtggcatcattgcgcaggaggttcgaagcacgttcaattacagcctcatggcgcattcggcgggtctggtcttgtgcggtagctggcgcggagtttgcagaaatattcaggccttcaaatgctgcagtaggaagaggctgagagcgcgacgtcgaggtagactgcactggggtggcagcggcggatcgctctggagcacgaacgggttggacgtcatctcgagtcagctggccgccaaagtttcgtgttgagacagactgcgaactctgtatagccatttgtcgctggtatgcaacttccgcacgagtcattggttgtgcactggagactggcagtggctcagcgttagggtcacggcctcgaccagcaccgcgccgctgacgttgctgttggtaaggagtgcgcatattatcgaattcggacaaatcaaccattctggcgtctcgccgaatgtccttagaaaggctatcgggatgtgcctcgatttggtgggccttcagatccatttgcgactcgaaaacgacaaactttttttccaagcattctttatccaggcaagcgaaatgatccttatggaagtgattttccaatgcgttgtagtcaatatagtattgttgttggcggtgggaggagcgtcggtcacagatgtggcaacgttcgtgtttatcgcggcagtgagtgtacagctcatcgtcaccatagaaccgttggcgacaaaacccgcactccggatgtcctctgaagccactctggtctatagctccaggctggtcgtcgccggacctttcgtgcttacgcaattccgccgtggtgaatagttcatgctcatgtgtaaagaccttcttgttacgagtacaaaggtcactattcggagtatacagtcagctattgattcaagaattgcgcgagcttgatatcgacataccacataactttgttgtgcttgctttttacatggcggtgcaaatctggccaccccaaacaggccacatcgcagtcttcgtccggacagttgtatcgcagcaacagcaccgtatctccgaatatctcgtcgctctcatattcgatgccaaggttgtcgtccgtccgagcaaagtccttcttgttgaaatcctcatatcgccgcactggatcatcagtgaagatcacgaagttcgattcagtctggtatacaagtcagcacatgaaatgtaactccaacgaagagcacctaagcttgttggaaaaaggttacaatatgatcataccctgcaatgagcacaagccctgttcttgtacagtgcacgcaaccgaagcgcacaaatatgacacgtcctatggttacaaggcgagaccgaggtatgttcgacggcagaagcgcaaataaagcagacttctccatcatctgcatcgtctgtagcctcttctaccggtttctttgctgctggcgtcgtggctttcgaaggctgagtatcttgattgttggttcgatcggtagtgcgagtttgtcggcctatatccccgccgctgccacgaccaccgccgcgggtgcgaggcttggggcgtttctctccatcgccggtattgtgttgcgaatctccacggccggagggagctgtccctccgcggccgcggcgacgcccaccgcgaccctggctggatgactctggtgttgaggcctggttgtcggtcattgcggaggaaggaatgtcacaatgcaagctacggcttggcgtcaatatcaggtgtgctggagctgcagaggcctggaaattgtggattgtggtgggggagaggttcggggaaaagtgagatgccgctgactgatcccgcatgccgcatttgataaggatgtgaggcctgcaaccgaccactctcttggtccttttgattacagaaaaagctcgaccgagcaattgagtgattcatggagcgttctattcaaggagtatggttttgtttccccattcccttatacaagcaccatgccagtgagtaaaagtactaggcagattcattggcttgttggcgccgacctgcttcatcaggtcaaaatatgatgagcagagagctaaataaatactgtttggtccatgtcaataggaagaccaccggctacatatgcaggccatggggttcaacaaagaaaatgagcatcagaagccacgcagagagcaaatatgatgtccaatgatataattgaccaggatcacgcatttcagtatctactgtctatatcggaaggatctccaattatgtatatcgtgtaggtagcagattccaggacctttgagactgtaaaatcactatggagggctacaccaactcccgctagagagcatgagcaaatcaaatccaaaagaaacaaaaatggcgagtgcaaattgctcggaattcacgccagcatccccatgcatcgcaaaaaataaaccaagaaagacaaaggagaatcgttaagaagcagggcttagtttggagcctgctcttccataaggatcaaagccaacctgtcactcccggactattcatcgggattgtacaaattctgattgagaattttagtcatagtgaacatgtggactcgatcttgcttgaagacagcacgcatagcattgtcgcataggatttgtcggcgatcactgggatcctgaagctcgttctcacgaatgtattgccaaacctttttgacggtttggggtcgcgaaagctgtatgatgtttagcaagcaaatcctagagagaaataatcggaagaggtgctcactgtgggctctcccagaagcgcggataggggttcggaaaggttcataggtttctgtggttgtgttagaaatggtgggaggcttgggatgatatagaaaagcatacgtggaacccagtatttcggttgacctccctctttggctcttcgccggagccaatatctgagtcgtcttctgccttgaccctcttcgaagttttggctttgctcttcttcttcacaggagctgcacgccgagtgttgcccccacgagtgggtcgcgcgcgtgaattctcttcagcttgcagcttggctgcgaatgccgcatccgcatcggtatcagtatccggcttgtgtttcttagcaggaggcgatgcgcttgcaggctcggaagtggcatcgctggaggcctggcgctttataggagatgaggagggaggcggggagggcaccgcagctgaagctgaatcaccatcgcgctgatcattgcttggggtaatttcatcaggcgacccgcccaccccgttttgttcggcgtaacgatcgaatcgttccatgatcagctgcttgagcgtagcctttgtgaatgtcagtcacagttcttcgccagtcatcctgaatatctttggggtaataatgcgccatagatcgtcgtaacttaactgaccttcatcggggtgagatcatagccgacggcatcctgaagacctttgcggattcgcttctcagagatggtagtgaggtcgcttttggccaaaataccatcaattatgtcgatatatttgtcgcgcaagtcagaggtcactattgcgcaagatcaccggtcagttaggaggctttctagagcaccggcaaattagcaccggggcaacaccgaggtagcttacacgacatattgttgctagtagatcacgtagcttggccagttatgttcagacgtatgagctggtttgggatttgcagttcgcaattgaggatatcgtggggtttgtagaggagtatggtggtcgatggagagcttggagttgtcaggtgggctatactcaagtcgcactggcgcttaagaccggcggggcattggaggcagagaaaggccaggcgaaaaaaattgcagagacaaaaggattatagataagatgctagacaaagaccaggtcaggcaaagagctccgtgcaagatatgcagtctaaaagaaatgtctatccattgatagcctctagaaacgtccataatgattgacgggcccgacctcaagctggggaaattatgactaagctgatgcagctccgtcacgtggtatcttgtgcctgaggcctaaagttaacaagtgctgactcagtgctgagtcagtccacacaaagaacccgcttggccgccgcgatttgtttctgcccgaaaatccatcagcggattgcaccgatctatctttgctccgaagcctctagacgccttcggtatacccatcatggcgcccagtttcgataccctgtccgagcaggatctccacgaggaagaggaggaggagattgatttctccggtgagtgcaagatttgtcgtggtctgtgtgcccctctctaacacattagtccacagatctcaaggagcaatatgaagtgaaagtcgaggagggactggacacatttatcgtcatcgatggcctccccgttgtacccgaagatagccgacaaaaactcgtcaagttcttattgagaaaactcaactccgttggcagcacctccgaagatgcggttttcatgcccgttaacgacaagaagatgactgaagggtgcgtattggatatctaatgagatgtggaggaatcatggacgatctctaaccttcgttcgcgcgatatagattcgcctttgtggaatatgaaaccccggaaatggcagtcgccgccgtcaagcagttgcacggcgtccctctcgataagaagcacattatggctgtcaacaagttgatggatatcgagcgttatggtcgtgaaggtcgtattgatgaagaatacaagccgcctgtcccggaaccgttcaaggagaaggagcacctgcgctcgtggatgggagatgccagcgcccgggatcaattcgccctttaccgtaacgacaaggttggcgtgttctggaacaacaagacgaacccaccggagaatgtcgtggaccgcgctcactggacacaacttttcgttcaatggtcccccaagggtacattcctcgcctccgttcacccccagggtgtccaactctggggcggcgagtccttctctaagcaaaagcagttcccccaccccttcgtgcagttgatcgagttctccccgctcgagggctacttgacaacgtggtcagcacggcccatccaggtcgaggaaggccaacccatattgacctacgaggaggacggcaagaacatcattatctgggatatcgagactggcaagcctctccgttcgtttgtgtcgcacgatttggctgcccctgcggatattgagggtagcgatgttgcgcctaagaaaaaggtgcagtggcctgccttcaagtggtcctcggacgagaagtacgttgctcgcatgctccaaggccaatctctctctatctacgaacttcccaacatgaaccttcttggtcgcacttccgtgaagattgagggtgctatggacttcgagtggtcccctgccaccgtcgcccgcgagggtatcaagcagtacgagcaattgctctgcttctggactcctgaaattggcagcaaccccgcccgtgtcggtatgatgagcgttccctccaaggaggttgtccgaacccgtaacctgttcaacgtttccgatgtcaagctgcactggcaatcacagggtgcctacgtctgcgtcaaggtcgaccgtcactctaagtctaagaagtctatggctactaacttggagatcttccgcgttcgcgagaagggtgtgcccgtcgaggttgttgacagtctcaaggataccgtgattaactttgcctgggagcccaatggatcccgattcgtcgttatcgccaacggtgaggcaccaactggtgccgccgtcctccctaagacttccgtttcattcttcgcgcctgagaagaagggctacactgccggtaacttcaagctggtgcgcaccattgagaagaagaccagcaacggcatctactggtcgcccaagggccgattcgttattgtcgccaccgttcactcccagaccagctttgacatggacttctgggatctcgacttcgagggcgagaagatcgaggctgagaaggatctcgcagccaacctccaactgatgaagactgtagagcactacggtgtcaccgatgttgactgggactccactggtcgttacgttgttagcagcgccagtgtgtggactcactcggtaagattttacctcgttctatttttgattgtgttacataatattgaccccattatagatggagaacggctggaacatgcacaccttctccggtactaccctctccgagaaccccaccgaaaagttcaagcagttcctttggcgcccacgccctgccactcttctaagcaaggaggagcagaagcaagtgcgcaagaatctccgcgagtactcaaaggagttcgacgaagaagacaagtacgctgtcgacatcgccaacaccgccgttgtcgagacccgcaagcgtgtactcagcgagtgggtcgcctggctccgtcgggagaaggagctcctggcggaagagaaggaggccttcaacctccccgaggacgcagattcacccacagccgccagcgacgcgcgcccggttgtcgaagatcagggcgactccgtggtcgaggagattgtggaggagattatcgaggagaccgaggaggtcattggctgatgaatctgtctgttctattttcgcaaataatgtgtttccttttgttcctcttttccccctatttctttgctggcgtttcgcgcttgtgcctgaacccagccttctgtccccttgtgtttcttttaggttccctgggcaagcccagtgaggatcgggacattacaaaaatcaatagatcgagcggtgcgcctcccgaccaaatgtgcaatgtggataagcatgagagatggctacgaaaccagttcctagcgaagttcaaccttgtacttcttattttaaattatttaaagtaaaccatctcaagagtaaagttctcaagtataaagcccccttcccacgcccaccgctcccaatgttaccagcatcatgcccaatgtcgagtccagcgcgaacctcatagcacctcccgtaggctgactctgacttccgatggtagtggatgtcgcagcattcggcgacggctcagtgatagacgtggaagaggactcagaagtcgtggacgaagaagacttggttgaagacgaggactctggcaagacgttctttttgaagtaggaatcatgcaagcccacaacatttccaggaggtgtatattcgcaaaccacataccagccttgagcccgcggttcgcctcgcgcgaccttcagcccttccaagccatctcctccagcttcatccacactgaaacgaggcgtcatcaccaccccttcgaacaaatcctcttcgaagacatcatcttgtacttcgacctcgacatctcttttcgcattgtcattcttcgtatacccacagttgacagcggcacacccaacctgcgtagttgacttccagaccaactgagtgaaatgccccgtcgcctcagtgaagcctgtcggcttgtcgaagttatacaattcgccttcatcaccccaggcaatgacagcagcagagacattctggtatccgtatgcgaggttctcgccgtagctgctttcctgcgaaggtaatactattagcgctattatctggtagtatggggggaattgatacataccgaatgtttccagatacaggctgatgcccactccttcgagtaatcggccaaagtgtcgttccatttcagtggtttggcatcgtgattggcgcggtaatcgttcgtggctttcagcatatcgcccttgaactcgtccagggaggtgtaggatggtgacacgggggctgtttgtgttggcgctggcacttttaccgtcgtccagacggttactacgtcggcgtttgcattgagtatttgcacggtgaggagtgtaagaatggccaaccatcgtgtagttctggtgtgagtgtttcgatccattttgaagaattcgagttattgtgagcaggtggctattgcatgatctagctctttttttttttcttatggtcttcagatcaatagatagcaccagggtccgaatccaattcaggcggcggtcctaagccgtgacgatatccccttattggaaggtggtgatgcaataatcgtgtattgtctattgtcttaggcaaccataggtatttattgtgcgtgcctgttctgttctcatagaagctccttcagataatattcttcatagagcttgagaaacgaacgtactcaacacctggagggtgaagaagattgctgggaagactgggaagaaatagagccattttgaaattctattaatgttttagactgcaaccgggcaaggcgaaagttggatcccttcttctcatctccgtttcagccgctgtggtgatgttccagcagccgccggtgttgacgtcagactcttagggctacggggttgcatcgtatcgaacgtatttgatctttgatagttgatatttcatatttcgtattgattctttgatgtctggtttatctctatttctctgtgcagctagactgtctggtttcgtctggtttcgctttgtttcgtctcgctgaaactgagaattggtgacattattatagaacttctctacttctatgtatcaaatcccgcaaatatgtaccatatccttgtacatgaatcgctctttatatactcatagcagtcgactttccctaggagaacattccgtactgacatgcatgtccgcattgtagggccctatacgccactcgctatgcaattctcgggggtatcggtatctatttacatcaaattgcaaccaaatccatacatagctcgttccacgtcccgcttgacgaggtaccagtcagcccgccgctcagcaaattcatatacctcctccacacgccaaattccatggaaccgatccgcatccgcgatgacagtcgccagttccttggcatggccaggatcgatcaagtaaatctgcacgagctcacggaatgccgtgaaatagagaagtagctcattgtttcgcaaggtttgaatatacttgaagtagtggttcatgtcgctaggaagtcaagtcagcttgctgttttgcatggctgaagatcgagatacatacctgatcaacttgagtgatccctccacactgatgcgctgtcgcttgaggtgtttacatagagcggtaaataagcggagcccaacttcttgattgaacacatctagggtgctcttgtccgtgctcccgactagcatctgcgtgtgcgatgaaaccacgtcgacgacagcgacagcgacttcgctgacgcctacatccatggtctgtcggtggggatctggggaaactccaggattgaaatcggtggctggctgtcgggttgccagaatgtagtccacctcttccatgagaacgtcgattcccttattcaggccagctgcgacacgttcatcgagcatctgttcgaactttttcttttctttattggcagggtccacaaaatcgttcctatcagtcaatctcatgccgatcaactcctgctcgtagaatacatccatcatttgcaggatcaaatcgccgacgttgaccagttctaggaaagtgaccaggggctcgaccccagattggtcacgctccccttgttcgcgaggtcggtagttggatagatgactgacagccttatcgaatccaacgataacgtgctggtatcccaatatacgtagcaatgtcacaaaaattgcctcgcattgttgctttgctgcaagtccaaattcgccgccaagccgcacaaattgagcggctctctccaagctagacttggcggaatgaactagatcaagtgcaatttcgatgctaaacagtgagcggataccctccatctttatcttcatgatggctgcttttgctgccagctctgtagttggagcttcgtcgacggccactggggcaggcgacgatattgtcgaaaatcgattggtatttttagatggttgcaacgggtttggactgcttgtttccgtgtctggtttggattcttcgtttgatttggcactagagaaacccggcaggatgtttaccggcatcatgatcactttcttgaaagaagtaaggaagtctcgtttgtcggcttggcgattgacatttgacatcaaaaaagactctgttgaggccgcttgttcggagagatgccggtcccactcactcactgtaaattcacaggccttcttgaaaaaatcaagctcttctgccaaatacagatcgaggtgtggctcgtagaccttgatcacgacattatcaagatactcatcgaatttagcatcggaccctcgtatgggaagcagagcctccgagaggttcatgcattggacaaaggtcgtcgagattgcagtgagatacgacttgatgctgacgccatgcagctcatcaaatattgccgcgaggaaaggagacaacacatcttcgccaactttcgtcataaaggttgatgtgacatccaaggccgggggaaagacgcggttcattatggatatttcgtcgttgaatgcgacactgagacgtgtgaaaaaagcctgcgtctgctccatcttaagctggccggtcgacccgtcaatgcaggaagcgacgcttcctaggtcagacttccgagtcatcaggtgattgtgatggataaagaggtccacggcagcttgcccaccgttgagtgtccatagaatgtgtgcgtatttccgcatggccccatcaatgtcgtcggtttcatacccctgacggaactccttcagcgccgcagtctcaaacatcgagactgtacgctctaaacggtcgacccgctcgtcccatccttgtgtcatgtcagatttggagaacattagcaactgtgccagtatctgcgcttgagcctggggatctttatatttcgtgaaaaccaaattttcagatgatggttcagatcgcgcgatgtcctcatagaacggtgccagtgcagcatgtatcttgccgtattcctgacgcgcctcaccccggattgaccttacctgtttcaacacggtcagggcgggttcatccatgagatcctggaataaagtgggctgtgatgccgtattgactaattcaatcttatcgaatccatcggatagtgctttcaggtcactagaagggtcatcagtggccgcaggaaccggtccaaccagctcagcctcctcttgctgctcgacgacctccatattggcgactgtcccaaacaccacttcggcatgctttctagcatctgcttcgtcccagcatccgattcgtttcaacttgtgtacccatcgagtgtcatcatacgccatctcgtgtataagcttgcaggaccgtgctgctcggatcaaatcaacagggccgacatggtcgagaatagaggatacgatctctatttttccttctgtcagcaagtgtttctttcgcctccgtatgtcttcatctcacgtacctgctggaagagcagctctggagatgtcttccattgatgccatgcgcagcgaggccagcacatctctgcgcgcctgagctgcggctgtgggccctttctttgcacctggcatattgtgttcctggactctgcatcggaagagaaggcactcgtggggatctcagaatttgaggcagcctcagactcgctccaagctgtcccgcggggttgtggggaatggttcggtctcgatatcgagcagacacggcgtcttcggggtatatttgatgtcgagttctcaagcagacatcttcacatctaaccacttatttctcaactacaaatcaggaaccacattccaatgctgcacgatcacgcacagacagggtccaacgccgccgcctcctcgggctggcaaaatgtacaccgctctctcatagagtcagctgtacggagtggacgatcgggctttctttaattggaaggaaataagacagttgaaggatatttggtttttgatgctgtagaaagctcaattgtggctgttgtgtagctatgaggaaagtgaattaagaaaattgaaagatttttaaagcaacttggtggctaaatatatacatcgggagaaggattgagatttaacatagaataatactttctgattctagttttttttgaaccattgagagccagaaaagccatttaaatcaatgatgttctccctaatatgatataagctgcaatacaagctgatatagccaaacatagctatagtaagacttacctatggagctatgtatggaggtacaggatagaacccgagatacccggtctttgaagaagatattgaatgttggggaaatatggattagtgtaacatatagatacatatgtaaatagtaagtagcaacctgatttaaaagtcttctagctatgttccaacagagcactggtgttccggtgatgcgtgtttttctcggtgaatcccgggatacgcacaaccggagaaaaaaagacgacgacacagaacaaaaagaagaacaagaagctatagaaaggatagattgggtctattctaaacaattagtagactttatatagatcaagtccattataggtcagcagaattgcgatgttccgagtgtcggttttctagcgtggccgggagccaatcagagcaagggggtaatcatcaattgtcaagtttcttcgacttcaacctcaacctccagcatctctcttctgtaccatcccccctcctctccccacccacccctctctcgctttggcgttacagcacctattcccaatcaaattcaattgcttgggttaaacatcgtcatgctgggacgttcgattctgcgcgcgtccaaccgggccttcgcccgccagtccctcgggaagtccacggtacgccctcaccccattgaccttcacggaaaaggacaattgatctcttaaaccggcattggattatccaaggactccgttgctaatatccaacagcgtgcctcttccaccgccgccggcgccgaggccgccagctcccccttctacctcacactcactgctgcgcttgcaactgccgccgccgccggttccaccgcatggtactaccacctctatggccaggaggccttcgccatgacacctgctgaggaggggtgagtgaaaatgcccaggaggatcgccgacctcatggctcattgtgcgatccatgctgagaacaatggtggaagctaacgggtgactttatctagactccacgctactaagtacccttgggtgcacgagcggttcaacaaaactttcgatcacgccgcgtgagtgctctctccttaaagccacattcgtgctctcgccagcatacattgtactgaccccgtccaagtctccgccgtggtttccaggtttaccgtgaggtttgcgcttcctgccactccctcagccgtgtcccctggcgttcaatggtcggaaccatgcacaccgtcgatgagatgaaggccttcgccgaggagcacgagtacgacaccgagcccaacaacgagggtaacatcgagaagcgccccggaaagctttccgattacattcccgctccctaccccaacgaggaggccgctcgtgccgccaacggcggtgctcttcctcccgatctcagcttgatcaccaagggccgtcacggtggttgcaactacgtcttcaacctgctcactggctaccccgacgagcctcccgctggtgctaccgtcgctgagggcatgaacttcaacccttacttccccggtaccggtacgtaacgacaagcccataccattttttttttttcctttttagtgtttctaactcggcgataggtattgctatgggccgtgtcctgtttgacggtgttgtcgagtacgaggacggtacccccgccaccacctcccagatggccaaggatgtcgtcgagttcctgaactggtccgccgagcccgagatggacgaacgcaagaagatgggtgtcaagtccgttgtcctcctgaccggtctgttcgccatctccgtctgggtcaagcgctacaagtgggcccctctcaagacccgaaagatcgtgtacagccccccgatcggcccccgccgttaaatgttgcagcaaggccttttttgagtgggaaaatgtgagaggctgaaggggccggtacgacttggggaacccataccacatccccggttttgatacaggtgcttcaaagaagcctctctgtttcatcattttctatgtgtctatctattggtcgctgtgtctgtgttttgttagaacgctccccgaacacctgtatctgtatcctagatatattctttttttcatttcctttcgaaaactgtgtgcttcgaggagtcatctgaatttaatttcctttgtgattatgacagatgaaatcgttacatataaccatgtaagtctagagttgctgtttcataggaatatgaaatggtatgttctgcgacgtggtaataagacgagtgtacagatcgttttctaattgttgtatgtatatggaagaatatatatggctataaagctcatcagaaaaggcccagaagcaacttcaggccgaggtatcatctagagtccgctcgccatccccaaagacaggagcgaagaaacgatcatagctattccacacacctgaaaacgtgatattagccacagccaccagccatggcggaatacgaccatcaggacctgcacatattctggataaaaccaaagtcacaatcaacaaaggcgcccacatggccaggaagatcaccttcccgatcttttggcgcacggttgtaatacgataagtcttgatctgcgcaagatatttttgatatgaaacaggaagatcatgttccgcagcgccagtcttgatcaacccaaggtagcgggcagagggctgagcgtagtcagaatccggccggaaatgcaagcagaccgtataccaccacgacagctttgggctgggcagcaccgtcgtatcgcctttccgggattgcgattcaaggcgcgcattctccgcagctggtgagagtagggtgcgtgccttgaaagctggtgtggtggggtagtctgggaccgggtcggatgagttgtagggttgagggaaggcatggcagttgatgacacagtcgcggtatccacgaccaccgccctctgtggcgatgatcttcgcgtagtcggccaatgtaacttcgtagacgactccgactagaggtttgtgccattgacgcttgtcgcaacccgagactgcctccacctgctgtgtccgacccatgagcgctgccttctctgacagatactcgctatccgcatctgtttcgtgatcttggagttcgacctcgtcatctgccaaaggagaaatttccctgtaatttgtgcctgcgaaacacggctctgcatacgggattcctggaagatcgaaggtgagacgaagttcgggaacgagcacacagatctgcgagagtggtttgatgccgcgcacttcacgaaaagtcttggaagctaggtttgacccgtacgcgagatagagaaccgtctcatccctggcggcggattcagatacaccaatcccgtgttcctgttgtatggatatcttctcgggaagagtcgcatcttgttcaagggaagtggcgacgcttgaggctcgacggcgttgaacattcgttctggaaatagggtcggtctcgagcttggcattcgtaggcttagaatagtcggcgaggagaaggcctcgaagccggtctagcggttgggtcgcatcgaacaggcatcgagaagctggcatctcttcgccgtcttgtgccgcttgttgtgccatcgtgtagacctataacgcaatattgggcgtatgaacatgagatctggcagcagggttaacctgcattgcttataaagcctgtcagccgcatgaattgatgcattgtcagcaaaccagatcgaatggtggcgattattaatcgtggatgggtcacggatcgcggagtttccacgggccgatcggatgaggattgaagatgcattgattccgagtggattctgaaggttagggatggtacttgagcagttgagtaggatcaggtctgaggagaatgggagagaatattatggggaagctgcttttgatagttagatgactgtgatctcaaagacgtgacaagcacgcaacttgagatataaatagaacacttggcttccccagaatctagatttatcaatctcggcatttttagatattcagtgaaagtagaacacaataatatatagaacacagctatgaatatacttccccacataattgtaagagaattaatagatattaatgaaatgagacctggctgttgattatcggatctatattcctttcatgtatatcatagtaggacaattggagtgatgttgtacaacatatagatgaggtatcatgtgatcaatatgctggaactgggcttagttcagcaccctcaccagctgcgcagctctggagaacacgctttcttttacataccatcctcatgttctgattccaaatgtatgacgatagcgaccatgaagccagttcagggctcatctgaaccaatcaatccagacaccgggagtaaggcgactgccaaagaccgagcgaccccgggatacctcaaaggctcaggtcgtcaaaagcaaaaagcccctccatcccagtcttcggagtcgaagattgtgcgactgaagttcacaaaaccaaggccacccaaacccaaaccccaagaagtggactgggatgaagatctgcgtcctacacccaatgagatagctgagaataaagggacccatggagggacctccgttgcctatacagacccgaagcgaccgaagacagttggcagaaacacaggaagcaagcgagcaatggaatcaaagccacaaacgacctcggccaaacgcaggaaatcgaacaggaagagcactactaccaaggagggcagcaacggagggccacaattgccattgataacacttactgcaagcgccttgcctcctgcagcccctctaggtaataacgggctttctgatatgggccccttggacgggcaaagcaaagattacgccacgaagctagatggccatgtgcccgaagctttgaaccaaccttcgctaccgacagatggccacaacaagcatggaaataacagcgagcgaggtgtgatcgtcgggataagaagctgcacatcggtgacaactgagtcatcctcggatttcgaagaccatggcaaagggccatcccgtacttcaaaagtcagcatcctggagcatcgggcacagtccaatagacaaacagataaaggcaaatctgtctatgtgatgcccgaggtatcctcaagttccgacatcgacctcaaaggaccgtctcgcatcactccttcaaaggtcaccatcctggagtcaagggcacttccaaaggaacgaagcagccaggccaagacggttcatgacaagagtcatcccaaaaatggtggtagagcacagagtgttggcaacaagctgatgcttgcgctccacggagcagagccttctcattacgagccagtcaatgaccgaaatgcacctctcatcatttcctccgattcagtgcaaccccaggaatctcctagaaagcagcagtctgaccaaatgccgatcgaaacagtgttggaatcctcagatattcgaagagtactggacaaagcaattcctgttgaaatacccccgaaccaaaccgagcctgagactgtcaatccagcattgattaccaaaacacttccgcctaaggaagagaagatagaacagctggatgacgcaagcttctggaagctcctgggcgatgacagaatgtccactccagcgagttcttcagaatttgaagccggcagaggcttgatgggaaacagcccttcaatccttgattaccacatggaaatggaacatatccccggatttgcaaccctgcagcccatgagatccgcaccgaccaccccttcacacgccactaacatttacgaaagccaggcagacagttcggggatatcagaggtaggaaaactcaatgatctcatagcagggattgagggacgcgagggtagccataccccggagtctcaaaagccacttctcaccaatgaatccctaatggaaccgaattatgcatctccccatcccccaaaatcagtcatgaggaccagcattgtcgacggtaacggtagtcctcgactcatgcctcagtcagccaagagcatggtttcgcctcagtttgatttggacggcgaaagtggccacgaagagacaatcattgtcactcacaccagtccaagtcaatacgatcgaagctcatgcagtatctctactgagagtaaatatgaagggctcatgtggaccaagtttcagagagacatattcctggaatatgggatccaaacggaaaaactggcgaaatctcatccatggccaccgcctaaaaagcatcgcccgtcgttctcccaggaggatactgctgatggggcccactccgagaaagcatcgacgactggaccaagttcttcccagagaacgatcgacgagagagcattaggcagcgctccaaagaatcacgagtatcttgaccaatcgtcccgaacagatatatcagggtcaacacagtcagctgataaatcgaatcaatcctctgcaaggggtgatcatgatgatatggaatggatatcaactttgcaagtggcgcagaaagacgcgcaccacctgcttcaacaaaccaatttggttagtcgatactgtttatgtgagtgggaccgtgctaactggcgtttagaatttgtccactcagctggcggcagaaaaggccactatcagtcgagtcctggagatctaccgagagggatgtagtcggatccttgacgacctgttccaggcgcaagaagcacgaatgcagctataccgacagcagatgcaatatgttaaggaacagcatgcagatatatgtcaagacctggttcgtggactgcaggagctcgaccgtcgggtgcaacaagggccaatctgaagactgaagacacggggcttaggaaatcacctacatgtattatttcggaggatgacacaaggatgagcagtattgcatgcaagtggcctgattcttataccgaaatatcaatatgatatgttttagtccacattttcccacatttctttttataaatgggatcgccgtgattggaactccagcgccggcccaagttcaccgaggatcacgtggaacttcttatactctgagcttttgactcattcgcgagcggctccaaggtttctctctatttttatattttggtattcttctgttcactgcaattacttccgtttccctcaattgcccttgaaaaactgccctcttcacctcccctctgcctccgatgtcggtgagtcaagcccctcattgatttttaattttacacctctgacgtcgccaattccacagttcttcattgataaccctaatgtgggcaaccacagtcatttggaagactctcgcagtaagtccgacagtttcattttacgcgtaattggtctctaacaagctctagttctcggctacaaccctctcaccccacccaatctccttcagcatgagatcgcattgaccgagaagtcacgacagaccgtactcgagggacgaaatgaagccgtcgagattgtccatggcacagataccaagctccagcgtctgatggtggtcatcggaccatgctccatccacgacccggaaatggccctggaatactgcgatcgcctaatgaagatgaaggagaagtacgccgatgagctgctgatcgtgatgcgctcgtacctcgagaagccccgcacaaccgtcggttggaaaggcctgatcaacgacccggatatcgacaacagtttcaagatcaacaagggtctccgcgtatcgcgccagttgttcgtcgacctgaccaacaagggcatgcccatcgccagcgagatgctcgacacaatctccccccagttcttggccgattgtctgtcggtcggtgccgtcggtgcgcgcaccaccgagtctcaggtccaccgcgagctgtcctccggtctgtccttccccgtcggattcaagaacggtaccgacggctcgctcgatgtcgcagttgatgccattggctccgttaagcacccccaccacttcctgtccgtcacaaagcccggtgttgtcgctatcgtgggaaccgtcggtaaccccgattgcttcgttatccttcgcggaggcaagaagggcaccaactacgatgctgccagcatcgcggatgccaaggctaagcttattgccaagggcatgcgtcctcgtcttatgattgactgcagccacggtaactccgagaagaaccacaagaaccaacccaaggtcgctgctgtggttgctgagcagcttgctgccggtgaggatgctattatgggtgttatgattgagagtaacatcaacgagggtgagtttttcgaacgtttttactatctgtcgaaagctgtttatactgacctgcgctaggcaaccagaaggtctccgcggagggcaaggccggtctcaaatacggtgtcagtatcacagatgcctgcatcaactgggaggacaccgagtcagtactggcgactttggctcaaggtgttcgcgctcgtcgggaaaaatcggaaacgaaataagctgtgttaagatattcaggttcatttacgacggggcatttcttaagcgtgtcacagtggataaaaagttcaatgattttacttctttcgggtttgaagctcaacacgttccaccctagggcaattttgctacgactttcttttttttagcagtagcgaagatcccacttagggcagcggcatttatagtggagataccgggccgatcggtctacggctacctcgaagccgacttggtatgccgccaagatattaagacccgtttaaatgctattgacttccgggacatctgaaggaattgtcaacggaaatggagaaacaccaaggcaagtacagaaaaggtttttagaagaacacactcgccgattggcggcgcagaaaggcgcctgcggaaggggtcgaggaagagcagttcggtagataggatcgtgtttagtgcaataggctaaaagcctaggtgtgcgttctcatcattgtatgcattaaatccgaaagtaaccctggcccctatgcccctgcgtagacttggcctaaattgcttgtaccttggctggaagttctttttttaagttggtcatattcactatggagacattgagacatttcaaaaatctgctattcatacaatgagtctacacattggccccgttcgattgggcagtaatcctcaaatgtcgaggcatacttgtggggagctcatcgaccccaacgaacggccaagggagccggtagacgacgttgtctaccaggatcacacccctcaacatgaaaccatgtgtgcagtcagaataccgagaaaatagattgtaccttttcctgcggcagaatagatgcattgcttcctgcttaaccaagtagatgtagttgctccgggaaaggaagcccacagcattgagttcatcgtcaaactgaagcattccctggtaggagaaggtgttcaggtaaggatgagaaccatcctgtttgtgtctcattagtaactcaaatgccttgagtgtttgcattccgaattccgtcaggcctaaggctggccagagatcatggcttatatgaatggcttcgagagttgatggcagtacatcgcgaagttcccaggaaggggtaccacagccaatgagaaatttgagcggtagagatgccgtttttaatttgggaaacttcatcaacatgccacaaaaagccttaccagcttgattcctcacacgcagagtgaaggcttgtagacaacatgggagaagctctaagctgatagagagatgttcgatcgtttgacttgaagtttccaaggaacgaaggaggcattcgggtgctttgagaaattcggctgttgcgcggcatttgtagaccatacccacatgtaaggactccagatatggcacttgagacagcagcgaagcgatttcctcaggcaaaagagatgttttggaaataacaagactgcgcaattttgacaaattcaagggtattttcggtgtcttctcagggaggacagaaataccctccacactaaggagccatatctcgagaaccttcaaggaaggaaggtagaaccaagggatgaactgacagcttcttggcagtttgatattgtcgcgtaattcagtgggaggaaagttgcttccatagtcgaccatttccaattttgagaattgacttaacatgccaaggggtgcgtcgccgaagagagagtgatgcaacatttccccgggaaagccctcttcaagcacgaatgaaaagtctagtcgaaggctgcgaaggttgtgaagttgcaagatcagcactgtggcgtacgcgtaggcgtctccatcaaaaagccgtccgagccatctgatatcgcgatttgccgggaagttcgcgtctcgaacaagcttccgggcccaaatcaaagtgtgcctatattctagcatcatcttgttccattcggcccttccttcggggacagtgacctctgttctccgggactccacgtcccaccataccagactgacatgccagatgtaggaagccagctctggccgctcggagatagtccggaggaggagcaggattttatcaatggggggatgctgccagtcccagtgaattgaccgatacaggaaaggctcagtggaggcacgagtgtcgtgtgaaacctttgacaagttgttcgaatcttggtttggcagatactctaatatcttcagccagcagtctcgagggagactggcgaggggagttgtgcccatagttcaatagatgtcaacttactatgctcccaagatggacgctgaaaggtgagatgagagtgagtgtaagaatataagaattcctaaagcaggggaaatgagagatgaaagaagaggaagaggggagggggagggaggaaagggaagaaacgagaaagagacaaaacagacaaaataggaaaacagaggaagaccaaggcgactacaaacacgaccttcagtacctggacatccgagagtagtatattcacaaatcatattaatacaagggaatcttaaaatctataatgcaagctgcaaaagatgagcgtcgaacagatggatcctgatgtataccgtgaacgccagcagcacacggcttgacattgactccatcagccgaatagcgaccagcaccatgacgacccgcaaaccctgtcttcacctcctcaaacttgcgttttctcgaacgtatcccagttgagcaagcccgctgaacgataccaaggtcctccaattccccatcagaaccaacaccaagagaccgggtgggagcatcgccagtatcaacatccaaaaccgtagctttgccatccttcccaaaagtccaaaccctgacaccaccctcagaagactgcaaagcaagctccacagtccccttaacagacccaatctccttgccatagatcttgaacggccacatcatagcggtaggccgatatgggacagacaacaggaaatcccaatccccattctggttttgcaccagactctcgcgccgcttgcgggatcgctccgagtcaatgtaccagtcgagtgcgagatcgctggaacccatcaccccgtcgccctgacgttcacgctctttgcggatgacgttgaatacgtccaggggaatcgagtacagcacgaggcggtcgccatagactgcgacaatacggagaccccagcggaggtcggagccagcggtgaaggttgatgggactgggaggtctgttggaggcggatttgtatttgagggggatggggatgggggtggtgtcttgatttgtcggttttgagtgtttgagaaaggtggcgggacgcagacgaatgcgcgggttaggcttgttggcccgcctattggagcgtcggtgccgatacatagcaggcttgtgcgtggctcgatgaacatgatatgcaaaccgtcgttaatggggacggcacgatagtggtgacagtgtgttgcccggacgaagctgcgggatggggtgtggggaatgatgcggcggttgaaggactgaatatctgcgaggaaatggaattggttgctttttgggtcgagttttggtgatgccaaggcagatgaaggggaaggtgaaggtgaagggggacatttgcattcgtgcaagcctggtccggatagtgaagaaatgagacgtagctcgttgggtgtttccggactacttgggaggaaatgaaggatttcggagggttgggggagggtgaagtgtctgcgttgctcctggtgctttgtttcgttcaggctatgaatctcgatgccagcggcgcagccgaaagcgacgatcggccgccctggacagagagcaactgtccggggtgggttgtcgactgtgcagatgttgtagaagaagtggcgggatgaggtggccattttgctgttgaaatgagatcctttggtagtcgagtctttggcccaagccatatccaagttgcagatcatgccaacacgactgcagagcaatgcagcgatggtgaattgtggcttactggtgtcgatgacggccgacagaatctcgaacggacacgagatgcgtgagactagcgctatgccatggctgaagggtgcagatgctggcctagaccgttgacccgaaagataataaatatagatcgtgtagcctgtcgttacaagcaggtagttgctgcaactgctaatgctgaaagttgacccggatcgtttgccttcggtctgcaaaaccggctgaagtcgagtgcgggatgttcttcttgcagaatccgacagattcgaaaagtctaccacagcggtagtcaaaaaccccggcttctcggcattcaattttcgccccgaaaggagacattctgtcgcaaagcggcggctcattctccagacctcgctttcatctaaccgagagacgcgtggcgtttgacagtcttgcagccatgcatcccaccaccctgctcttttcaacatgttctcaagtagcttgtggtttaggctaattcgcatccactgtgagcatgtccgccgggcgttgtcgaagtcccgcggtgtcagcatggagaaaatctccagtaggatctctgccggtgcaatatttgcagcgggacgagatgagctgctcgttgaattgcgttttgagagatattgaccctgtgccatgtattttgtcacagacttattcaaaattgggggtattggcctcgttgagtttcgttttgtgtgcgtggtagaggcattcttggacatcagacgggtatagtcttgaccggaagaccgcagcgcaggcatgttgatataaccttccagcaaaggaagtgatccactattcattggatctcaatccctttgttcgatccagaacatttcttgcaaatcagatgttgggattggatgtgaagtgaatttgacggcaattaattgattggcgtgccttcagttgaaaatacaccaaatagcacgacccaagaccgtaatttagtgacgcaaagacccagggaaaagatctttcactcaaccgggtctatacagcactaaacgtccaccggatgaatcgcctagaacaccagtaagcccaccgatctgcaatctctcaaacccgaactgccagcaattttaattcaagaagggtgtccacttacttttattaaagtatatacacagctcgtgacactaaggtttgaatgaagtacgtgccaagtgcaaggttgtattggcctcacgtctgaaagcgggtgcgacgggaatttgatacgacaaaatgagacccgggagactcgagggcgaggcaagggctgacttgtttaattaaatactgcacctcatcatttccagaggcaataagctaagtttgccatctagttaaaatgaattacaatcttacgagtctgacgtcgacactcacaaaatagagtgagtcttagatgtacctcgcggaaatccgacaaaaagtggagcacgtcaagcgacatgtaagaaacgaatatgcctatttaggtaggtgattaatactagtacatcatgcagtcatgtagtagatgcagtaaatgcagctactgtcattccatgctggaatggacgttggaggcaacgggagtttagggtttggtgatccataggcctaaccatcaagctcaacttacgcatcgagattttattcgacttcccatggttcaattcaatcaaccgtagcagccatagagccgtgttgcagtctaagaagatgccctgttccaaaggaagtgcccactatcaatctgcaacactgacattccagatctcggggagagaatcgaggaatgcgccccggatgcagcgcatggcttggcactgtcgaacctcactgcttacatgcagatgtctctaatcgtgtgatgatggtcataacaagaagataatactaacagccttgaacaactagtatttagttcagcatatcccacattcctgaacgcccaaggatggtttgttttgtctctgttcttttcttactgtttcatctcctcaccgcaagagagacaaattgtgccatcccccactgctcaggaatgtgcctcgaccatgtggaccccagggattccagaagacggcgattctgtggatgttcgaagtatgcctgggatgtgggttagatcgaaccggtttgcgaagccaataatctccagatgcaaataatggctattggacggtatattgttttcatatcgatgtttacaaattcacaattggggtgtggcccctagcagaataatgtctcaggttgtctcattgaggccaatccttgagacgcacctttcctgcaccttttatcttgacaactgtaccaagctatatacatccaaatacttctacattcgctagagaaaaaatataagggtttggctttctcatccctttcttcgggacctattgactttgtgctcagacacttccacgtttttcgcggacttattttggaactgaggaatgcgagaaaaaaagtaaacctaagcgagcctgatgtctttgccgaggaatccgagatacagacgtacttcggttggagcctgccttggacgtccgaaaggcagccggtcacgcctgaggggtaattagaaagcgacgaaatccacggaccagtatcgtacagacagatttgcgctttgagaaggagaaggccagaaatagcattgacgcaagataattatggtatcgtatacaccgagtaaatgtatctacagctccgttcccataccgctctcaatcatgttccctctcggtgcgccgggtgctccaaatgcgattagtcttagggactcggttgattcttacagatgatagcgattgcgcctcactagcgacctagatataagcccagaagtaaaaggacttgtcaagtccaatgaattctagacgacttctctttccagacacaataagccaattctatgccggctctatattcgtgtttgacataaacattgaaccacataaacgaggggactggaaaactaaataacaaactcaatcactgcgcgggaggggaataacgagggacaggcccacaacaggaaaacaatcatttcatacaaggatatcataaccatgaaaatacatcagaacaagatcgtgaaatgcgaacaaggtatcaagatcgtaaaacatgacgggtcaaagacacatgcagaaatggaatggagtatactgacaaacggcacaaggggtagatcaggcgaacctacacaaccagcgagatcaaacgctctgtgtcggatggacgtccagcgcggacgcgccgtttccgttgcctcgagcggggttgggaccagggagccaggcagcatccaacgggataatcaagctcgggttgacgtacttcctcagccgcaaatcgaggtcatgtccgccaatgcgtatcggaaagctatcgcgatctaggcctgatggcggtgagaaggtcgatgaaggcgagggggagatgtcgccaccacccggctggtcccgattgatactcttgagggcaatgaacttcatcaggggctcgtatgtacgcccaaaccagtatgaaaaccaaacggtgaagcctagaagtggcaccaggagtagcgaccgcgtgatagctcggcgcagagccagaacaccaatcatggccagctgatgaaccaacagccccacaaacacgcgattgcaaatcatcggccacgcgcggccagtggaatgttgctggtgatccatggcatatagcagttggtatttgtagataaatttgccgactgtgaagtagatcagcccgaataggcagatcagccacgagctcgggaacacactgtaaaccacacagatgactaatatcaagatggtttgcgggatggagaaaccgtagctgaacttgggaggagttgacagctccgcatattcccgtggcgtgcgtgctgataggaattggaaggggtagagtgcgacacttccgaattcgaggagtcggaaggggaaaaggcccaatccctgcagaatcaacaggttgatgtagaatggagccaggccttcgagggaattggccaatgcgagggcaattgttgtagaatctttaaatgcatcccgaagactttcccagaacccatagaagccactcgctgttccaaacacagtgaacagaaggaacaaattgaagaacgagaagaagaaattcttggagatcacggagagctgaacatccccacgtgacaccattccttggttgttcgagagccctgcaaagataattagcgatttgaactacagaacgggtatgttcaaagacttacactcatagagataaggcacagctactgtcaacagcgagaatgcgagggtaggcaatccggtctgaaccaacgacttgacgatcggatgttcctggaggaattctgccagccgagggacaatcgtctcaagtgtcttcagctccagcaatgaggcaataggaaccaagagcacagaccaaaacacggtgaggaatccaatgaccatggtgatggaccatgactgaaccattcgtcgagtacgcgacaagtaagtgtttttccaaataacatctgccggcgccggtgcaagtcgagcgaacatctgcattgggtgtggatcaaggatcgcttgaacaagcatttgagacgcggcgattgactccatcgtgacgaaagcaatctcggtagtaggatattctttctctcgggcgtttttgatatgttcatcaatcttccgtagcttctcctcatagtaatcgattgcatcgatcatccggaaacgaagcttcaatggaccataccagatacgagtcttgggtctttcattcgaatactccgagacatgctcgttctcgtgtccggacaggagtccggaccgttcatcgtctgcatcacggggttgttgctccgtcagcggcaatgtatttccatcgttctttggtcgcttgtatcccatatgttttgtccatgctctctcaagttcacgaatgactttcattctctcgtcgatcaattcgtccagctcccgccactttcggcacaccgtgatactctccactttgccgactcgcaggccttccacgaattctttgatcttatcttcggttcccaagtcattcgggattccggacagacgaatggtgcgatcagtggtgcttgtctgattcccgagataggattgccgagtgcgaataattacttttgtctcgtcaagaagcatgtagatggccaagccactgaagacatatgcgaacagtacgtatatccaaagatatccagggtctgtaactggcttttctttttcgattccaccaagtgaactcatggtatcattgccggggacgttatcccagccaggaactccatattggccggtgtatttgtagtgcatagggaggatgatggcaacagcgaagataaagacagccagaagaaatcggatcgcaaacttgaagaaagacatgaactgcccaaagactcaagtcagcaagtgtccatgcattgtctggagaagccatagcattcgaacataccacatatgcatctaggcccgcagactgcagcacctcctcttctgtaatccgatgaagaacgggaatccaaccaaaaagggtatctggaagctcaggtaactgcgaagcagcatttctttgtcgtcgtcgggcagcatacaactcggtccattttggtcgcaaaatctataagcaaggcagtcagcgattgacgacacctcacagtaacagagatacttacacagaacgtcaaaaaggcgatgagaccaagcgcagagctaattacaaactgcgtgtatagatcgcgctgttctttcacaggatcgttgggacgccatggccttttgcttccgtcatcaggcttgtcggcaagcaatgtcaacgcagcgcaggctgctgatgccgtaagagacatgaatatgttttataagggatctccgcacttcgggtttccgtgatggcttcgacgagcgagtgctgtcggagctaatggttcgtcaagggcatgcgggcccactgaaatgactgacgtcagggggatgagatggtcaaatgttggagacgattcgatttctgttgttgccgcgattgtcgagtccttcgatttgggtttcaaagggagattgtgaataaatggggagtctccccctttgttttttgctgttcatcaaaccttaaccttcaatgacggcttccggagccggctgcataactatggatgagtcatcatttatacgcacccctgggcataatccggggattgcatgatcataccaacgccagatatctacattgactcaggtttgaagtgcgctctatagatgatctattttgtgtcacagcctgacgtggtgcaaccatgaatccagtcaaaagctgggaaaatctttcatgcatgatatctaattatgcgatatgttcaggggaatatccaatcgtttatctaaaagccccaatccaaatttaggaatgcatcgatgcgtcatagtaaaggtcaagcagacatccggcggaccaggactgggtgggtgactgtgtttttcgttagtatcctgtacaaatgagaaatttatcgaaacgaaagtaacttaccgaatcattacaatactccccagtcttgttcgtcaattctgttagccctttccaaggactctcttgcaatgccttcttgcagccatagagtcgtcgggtgacctgctggaagcattcagtccgttctccgggcgtctttcggcgcaggagatcgaaatgcaataaagcacggaggaagtaaccgcgttgccagacccactctggaccctgatggtaattgcgacccttggcagtcgcgaagtcactggagtcatcggagttgatgtagtatggacggtagttgagatcggagggatccagtgtcgccatacccacagggcccacgattgtggagtcggcaattgacagagcgataagagcctttgcaggcgtgaatagatcccgagcgactgacattgcgatggggaagttggagcggagctggtagtcttcgtagggcttgccagacttgtacaaatccttgtagattcctcggcggttgacgattttcgcgtccacatcgtactgactatcttcactgggatcaaggggaacatagtagcaccgctcgaagttgtccttgattttgcgcgcccattcagcaaaagtaatcttcttgccatcggagatatccacgccttcatggggatacgccttggattcatgcagacgtgccacccatgccagagcgctgtaggcgagaccggtaatctcaatagcggcaccatcgcggggcgttccagggacacctttgtttccagccttggtactttctcccatcttgtcttgccaagtaccacaattatcctgattgccaccgaaaatcagacccgtttcccagtcaaccttaacgtcgatctggaaaccttcaggcttcatctgacaatcaaggtcgggaccagcgttgtattctctgaaagaaatgccagaagcatgtctttggaaaacttcctggacgcattcgagaagagtcggagactgagagtatgcccgagaatcatcgaaggggaaccaagtgtcgtcataaggcaagaatcgtcttggaaccttctcttgcaagatatcaatgccgttgggtgccatttcagtgaagtcctggatggcttggaggaagaaccagacagagtcccgagaattgtatcgtggcaattttccgctgctcagcaaattgggaatcatgccatgcttgattacacttgcaaaagcgagaatatgctccttagcgtcatcaaagcgttgagtgcaaaggaacaagccacggatagaaatgaaaatatctcttccccagcatcttgtccagtcaactgcaaaatgaggcagtccggctgcaagactggggaccatcttggttggccacaaggatgcggatttcacatagccagtttgctgtacgctgaccatagccaattgatgaatgaattcctggccatgccgcacgttctctcccaggagatgaatacccctcttccacgcagcattgtaagcaacctgcagaacgattgcgaaataccttgggaaaaggaagttgggcaagtcgcggacagcgttgaacttctcacgaagccatgcagcaggagttttcaaggcgacacatccttccctagtagccgccctctccaggcgaccagtgatgtagtccaaagcccactgaccctctcgcaagtgatcgcagagcgggtggccaatttggttatacttgatgatatcctcaagaatactccaccaaccctgaagaccagcatagaccataggttcaagctttggaatgctgtaaataccgtcctgaccgtcgctagaatctctctcttcagcttcgcaccggtatagcacaaagttcagatcaatcaagctgagctcagagaatgcgtcgtctgcaccatcggcgaggttgttttcaaatccattggcatggtctgctccgggaatccatgtctcgaaaagagcaatagatccgggaacaagggaacccagtacggagattttgagatctttgtcatcttgctcgatcactgcaccttctatatcccgggtatggctgggaagacccttcaaatacttgtcatcgcctaggatcttcgcctttgtttcatcactggcatcaacctcaagctgccacgatccgatatgcttggcactggtacaggcaatatgagttggggcgagaatcgcaccactctcattgccagggaatgcggtatgcgcgaccaagaagataccctttctggttttagggtggactcggtgcacagtgatgtattcaccatcgtgatgaatgtgagtttcgtcgtagccttcaactcccatcatagtgtggagttcattcagaacctttttgacaccaccaatcccaccctctccagacccgacggctagagtctcggaattggaagagtgagaggtgtattgtcgagtctcatggacaagatcaatgagtttgggatacacctcatcgtagcccattacacttccagtcgcggaggcacacattgccacaagtgcagcatttggaagagtgtctcgagcatcgcgcttctgggcagggagttcattgtcatgggtacagtccatgaacaaggccggaactggacagggccgaatatgagtgatcttttcgccactcttgcgagacctagctgacgcaatagcatgactactgccggcagaaggcaaatccatctcgaagcttccgatcggctgacccccatgacgatgaacaagacgactcaactcttctgtgctccaagcctgcatggcctcccgaatcagagcattgatgcccagccgtttgacgaagacatagtcggcctcctctgagcctgtgaatagttccgcaaacacagtcaagtcaggccggaccttgcgagcttcgtccagcaaatgttctgcaaccactagcggtgtcgaatggcaattatcgattcggaaaccactgaagtacttagccatgagacgggtatactgcgacatatagtcccagaggaaaggattatcttcaggagaggatccgtatcgaagttttacacaatcaccccacacaataacttcgcggcgtaagtaggccctggaatcgggcccggcattatctttcatcgcgtcggcattccagatccaaccgttattgactaaagccagggctttagggtcgtgatttttcgtgatatcattgagaggaaggcgggtaaagtaagtctcgatcaatgggttttccttggtgacaggacccatcttgggaccatgatcctcaattctgagatacttgatacgattgaacagttggtccatgatagcatcgacgtctgcatcatactccttgtagaatggcaagttggcctcatcgagtatgtgggacagggcgtgttcaacctcagcaaggtcggtgtggcccttatcgtaatctccaaatagcacatttagagcaactgctccgaactttgggtcgacggcgcggccaaaacgtccgcgaatctgctgaacggtcggaattccaagctcgcggagaacattggcttgttgcgtgagcgaccagtgtttgaattgctgcatctcgccgctttggacaagcgcaggatcgatgtctgcattgatccattcgtctataatcttcttaacgtcattctttacgtcgagaacgtagaattcccatagacgagttccatcaatggcttccttgcgtgcagcgttcataacagtcactagatcctgctccgttttgaattctgtcggaagaccggcgtccttgaggctatcgccgaatttcaaaagcgccgtgtctagctcgagggctgactccagccatggcgcggtctccacactgtaaccagactcgggatgctcctccagccacttgctgttattagctgtgtggttccataccacatcagtcaatgtgagaaggccatagtctttctccatcttcgcaaccaatgtagcgatatcatcttctccattagggaaaaatgcgggatcgaatgttaattgatcaaaaatactatagggcgagttggacgagccacggtgcatcaggggtgtgaaatgaaccatgttgtagttccgctgaccgatcccacgaaggtgtctatcccagtctgttggatattgacccatgaactttgagattaccgagaagatagagagtgcattaagcggcaaatctttcccctgaacggtaagtttgggcgacacatcaatgtagtgaacaggtgtcttcgtcggcttcggggtagacaccttgtcgaccgagaactctggcagcggagaaaatgttgtatagaaagcaaacgcgcccgcgaatgtcacaggaatatcgatttgaatgttctcactgaagttgggctgcagtctacttttattcagcaactggcactctcaatttacacaacatataggaagaattgggatgatctacctgaactcccggaatgagtgacgttcaaagggctttccctcctcgggaatattcacccagagactgccttgtcggcaaatggagctcgttccctcgatgatgaatcgaagcacatatccggattctggcggagaggccaggtaaatgtacccaccaggcacgtctggagaaccgtcatccttcaaaggaagcaagtagacctgacgtggggaggccatcgcgacgggttgataacgattaaacccaacggattgtgagagtacaggagaatctcaaacgattcgccttactgtcactgcaatagtgaagaggatagagaatatttaaggagagaaggaaagaatttaaaagcagggaaggaaaagtcggaagacaagagaacccagcgttcccctcatatgttcctggagaaagctcagaccgcgcggggaatgacatcatgcactcattttccttggtaagctatcaacaccatctacgtcgctatgcatccacttgttttgacagtcttttaaagattcaaatcgtctagtaaataatcccgcttcagttcataaatacacgccatgaaagtctatacacgccatgtccaatgccgaatccagccgtaattataatcgtgcagaattgaatcgagcgccattatccttaccattggaattttgtgacggagaaactggggctcgggcgtgaggggggctagagagagccaaatggtttgataagtaacatgaacatagaagtagaggacattcaagggctttttaccgctcaatgtaagaaggaatctcctcgaccttcatggttccctccaaaacacctgtgcaatgttagcttggatcgagccgtcacatgtcaaaagaacagtatgaaaaaaaaaagaaaaactcacggtaaacagcagtgaacagagggaactcatcctccatgccttgtgtccgcaggaaactgttgacttctatagcagtagaagtaccttgcaacttctggccgttgagctcagtcctctcgatctcctcgataggctgattgcgctcaacgctgtacttggcacaccggaagttacgaccgctgctggcgctggtgatcaagtctgccacaccggcgctctcatcggtgaaggtgcggttgtcaatcgtggcgctaaagaatgtgtctccaaacttgaccatttccatcaagcccacgcgcatgatagccgccttggcgttatcaccccatcccatgccgacaacccagccagcggccagagcaacaatgttcttaagagctccactgatagacacacccgcgacatcgttgacaacacgcacgtggaagtaagggcggtggaagagtgttttcagcacgaggtggtccacaggagggtatgctgacggcagggcctgcaacttgacctccgagatttgacccgtggtatccttgtgctggaactccaccaagttggttgtggaggaagaaggcgaccgctcgggagtgggggcctgggagtccaagtgtggggggtcataggcgatgctggtctcggaccacttctcttgggcgacctcaccggcgatgtttgcaccagacagggcaccgcaataaatgcccaggattctgccaatggtctccgagaagaggtggatacctgtactgttgacgtccacacccttgatgcaagagatgccacgagcgtaggggagaatcttgcccttgatttgctcgcaggtcttgataataaactgatggggcaggttgaagatgagaatcgtgctgtccttcaccgcatcctctagggacggattggcgtggaggttgactggcaactggattcctgggaggtacttgacattctcatggaccttgttgatcacctcagtcaatttctgagggccggcgagtgaggcattatagttcttagacgtcttcgggacctcgacattttcctcgaatacccacatctccaccttctcctcgaagagattggggtttccggccgcgttttcggcaacgatcttagcgatggcgcagcccctgtcgaggaagcacacaattagcacaaatccacagctctttttgaagactaatctcttaccagttaccggagcccaccaccgtgatcttgtgcttgcgctgatgaggagctgtagaacccatgatgtgtgtaggagaaataattgatctgtgggaaagtggtctggagaagggtttaaaaggcaaagaagaggccggcgggggcaaacggggtggaataatgaatcgggtctggaaccgggctgaccgaggtcgaaatagggcgatagaggtgtgaggaacgcagatccgacgtaggtttagacgaatatccatacaagttatcgttgggaccccgataattccaacctgtttcgggattattgccttctgatcacaaacttctgatgtcacacgcaaagtcgacttcggagatggcaatttagcgcataactttttgttttcgcctttgacacacacatgaactaattagttgaggagagagccaaacagcgttgagttcctgggcaaaggagtggggagagtggatgcgggcggtgaacaattggagtcgacggggtttcgcttttcccgtcgcaatttcgtcttttcgttaactccccgctgtagatctcacatgtcaacatggtaagatgcactattacttatcttgttccactttcagccggttaattatcgttctatcttcacaggcccccattcgcaaatcaatgacgaaaactgcctcgggcagaggtgcgatagccaaacctagtgtctttggtgacgaatttcgcacgagcaagagggataagcgtcagatcaagcatgctgccctcgtgtctaagatcgagaaaaactctcaaaagacccccaagcgtcgacgagcatcaaaaaaactcgtcgccaacctcgaatctttggccgatgccttgcccgaagctgaagaatccaacgatgccgccagtcaagtgaatgtcatcaagcagaagaccctgagacacaagccaggcgccctgaagcgccgggaaaaaatggaaagattggagcgcgaccgtttcaacaagaacctgaccgagatgtccaacatcacatcagctccggctgccaacaatggcgaggcgagtaccgagtcgaacccgacggccagtcggtggtcggcgctccgtaacttcatctcacagacgatggaacagcagcctgtgttcaagacgaataaataagggtggctaggatgaaaataaaaagattcttggtgattgaaccacgactccggttgctgctgctggcagtgaatatctgtctcacaagtgaattctggcaatgacaatccaaggacaatgctaaaggttgagtttaggcaaataaactggagtgtacgacgctcaaccaaaacacgatcggaccacttgcttctataggatctgaacggtgaaatctacggtgccaagcaggttttgcggttcaagctcctatatccctgggggcattcaacgccttctggggccacagacgccatcaaacagccctcgatattagagaccaataatcaaatacccatgtatttatcttactaaattactgtctttccactcgcatgaatcagaatcaaatttccaatagctgaaatattgaacgctatggtttgaactaaccagcttatgttatcaagcacaattccatccatagttaccacccacaccgtttgttcaagggacgtcgtaattcgtcaccggtacaagagttatctcccaatcttaatatagtaaattatggatcagttgcccgggggttgctcttctagtaataggaccttcaagattacatgaagcacacaacatatcttaaggcttcgagcatcaaataaagcaatcgctctatcggcatactcggtacatcgttattgtctttgaatttacccgccggtccacccggcctcttcatcggcccgatgactcatcagataagatcacctgcggggaaggctaactatccggtatctaatccatcgctctccaattctcccgagatccttcctttaccttgtgactttaaggttctctacccacttcttataaaccgcctgtgatccactggcgcccagcaatgctgtggcggcacttacagcctcgcctcgcggcgaccttggctcgtcgtgacattgtccggtgtcggcttcctaaatcatacagccggtcaacacgccaactgtctagctccaacacctttcccacatcgtctcaatttaaccggtcagaatttacaacacaaccatttactgggagctacgagactggaggtcctactccggggccattaggatcaaccccggccttcggcgctccccgcatcacaccgaaagtcttaaagcaatatcttgatcaatatgtggtcggtcaggatcgcgcaaagaaagtgctcagtgtcgccgtgtataatcactaccagcgcgtgcaagagttagtgcgccgagaggaagaagcagccgaggctctcgcgaggcgtcagcggagggaagcactcgagattcatcccttagacggtatatcacctattgagttttgcgctttcgctcattttctgattgatttttcgatacagcagatgacattgcaggcgtgcgcaagactgctacaatacctcaagcccccaaatcccgcccagacacccccttggaccaagcagatttcgccgatacgtcgccgctacagcttgaaaaatccaatattttgttgcttggtccatctggtgtaggaaagacacttatggcaaagactctcgctcgggtgctttctgtgcctttcagtatctccgactgcactgtgttcacacaagccggttacatcggagaggacgccgaagtgtgtgttcaccgacttttggcagctgcggactacaacgttgagcaagcagagcgtgggattattgttcttgacgaagtggacaaaattgcagctgcaaaggtcagtcatggcaaagatgtcggtggcgaaggagtccagcaggcgcttctcaagatcattgaaggcacaaccgtgcaggtccaggccaagccagagaagaatccccgcgcaacgaatgccccgaatagctatccctccaacagtcctctggggaatgggtcatttcaacccaacaaccccaatccagccgccaagggagaagtgtacaatgtgcgcacggacaacattttgttcgtgttctctggcgcgttcgttggactgcacaaagccatcatggaccggatatctcgtggatccatagggtttggtcaaccagttcggaccacctcaaacactagtgatttccctggctcgccaaatatctctaccaaccagccacttccaatccttccgggatctgaggaagaagcactatacaagaagcacctccccttcttctcctctacatcaccagccggttctggcgccgagccaacctatttcaacgcactcgatctgttaacaccctcagacttgcaaagctacggcttcatcccagagctgatcggcagaattcccgttaccgccgctctctctgcactttctcaatccttacttatgcgcatcctaaccgaaccccgcaactcccttctagcccaatacacgaccctattctccctctcgggtatcgagctgcgcttcaccacaccggcactccacaaagtcgccggcaatgccttcacaatgggcaccggcgcacgcgcgctgcgaactgagatggagaccattctcagtgacgccatgttcgaagcgcccggctcgagtgtgaaatttgtcctcgtgaccgaggccgtggcagaccgtaaggaacagcccatctaccttgcccgtggacagggtgggcgtttccatgctttaatttccgccgaggaaagtcaatgggaagcaaagactcgcggagaaaagaaagaccaggcccaaaagagtaaaacgcaagatgatgcggatggctccaatgcgttgaactcccaggaccagaatcgagcaactggttaagtgtaaataaatggtatactttcatctcaccccccggtgactatgtatttatacatttccgggtattttttcttcgtatcccagttgcattggcggcatttagcgtgcagttcagcaaagcaatacctttggaagctccatacgttcgtacgatcggtctttcattactgatcgaacgtggatctcaattttgaatggaattactatatatgagtaaaagtctcctatgaaacttttcacaaaagtttgggttcatttcatggcttcatggctttctaggcatagtacaacaagaacaaagcaaccggggtatcataaaagattgtacaaaaagagaatatgagagcaaccatgctgtttgaagtagcctgctttgatcggaacttcacaagaatcacttgtagggagcagggtactgtttcgtgccattgccgttgctgcctgtgagggtcgattgaatagaggcattggagttgtgagatgtccaattcggggtctggggtgtgctcatggccaccggggtagttgcttggctagaaggctgcagcttgggacccgacaggtaggccatgagggtcaatgaatctattttgaaccgtttaaagaaatggccgaaaccacctcgcatgacagtcatatgaccccacttgtcccaccgtgccccagtgggagcactgagtgatgtgacagcgacgaagttgcggaagcgtggtatgttaatcaatgaccaccctgcgaagaattcgatcagatgatctgcatcgcgttcaaccttgtccttgattctgaggtcgtggtgctctgtacgactacagtattcatccagagagggtgcgataacgttgcttcttgagttgtgatgtagactggctttatcaaacaaagctgcgcgaggatccgtaacgttgttcttgatgatcaacgtgtagatgagcaacaggctacattcaggttagtaagaagcttgagctaaacaacgatagaaaggtatgacatacagtccatgatcttgcgagtgattttcgtcaccgagtctcatttcgatccattcaagtatcctagggggaaacattaaggtccaagatttccgtttgtgcttatttgcattccgaatccattgcagagtgaccgccaccccttttaggtctgtcaacacatcttcagtgagaagtatgacaccgccatacggaaagatacgtagacggtggtcactaggtgaacaataccggggatcaactaattcgagtggtctctgaatgcgaaccatccagaaattgaacgagtgggcaggaagcacagaattgagaggaggctgcaaagtatcgtatccaacgaatgattcgtgaaactgctcttgattagttgtctgacaattgtgaacgtgtaaaaatatcgatcacatactatggctacaccctgtctgctgttgtgcacaaattttgcccaatctccagggctgttgcttgtgaaaagaatcttctcatgatacttcaagtgcacctgaagaagctgcagttccttttgtatttcttcattgcctaggggaaagtgcaaatagaaaatatctgcctttgatagcttcccaccttcctcgattgtcgcaagttcttccacattgattttgtgggctttcatgaaatcttcaaccgcttgaaccgctcgagcggcttgctcatcttgtgggtgagggatagcgcacattgaattatccctgagttcacttgtgggcggaaggctttgggctggcgctggggccagcgtctcccgcgagtgcacggatccactcgttgttatatcacggtggaagtccgaccgtcttgggggactgccagactctaggctatcatccctaggcgccttgacgcgcagtgaaagcgatgtatttggcaaaaagccatgcggtcttccgtgaggctggttaggcccacttgaccagagaatttcgatcggtgcgagcatagtgcgagcggcaacgagtagaggaatgccaggtggcacttcatcatcaggatgtggaaacttgaattcctgtgacccgtatgaccaagcaaccaatacaattggcggtccatttccgtttcttctcctcggaggatagtggatggcaatgaggtcgtcctttcgcagattctctgctagatgaaacaaattttcgttggtgtcgctgaagccctcaacccaacctgtactcaatacagaatttgtcgcctatagccaatgttagcattatataagggacaatatacagatctggtactgacactagattcgcatagtctctcgtactccccgactgtgcataggtgtctaaaccaaacttcaatctgctttgttttcgggttcttggtcatgactagagatttctggatatccgtacggaagccgcataatctgaaagcaccgaggaatttccggtccgatcccataaacatattaacaagagcgtctcccttgacgcaccagtatttaccaatcttaatgcaagtggacggccgataagcacgaaccggcatccttggaaccaatggagcgatggaaagactaggttgagccgacgatctagctttgggcccggtgggaaccaatgctggagcattgactgatggattttcatctaacccagttgagtttgaagattttggagcaagccgataatgactcggagacgggctacgaggcgtgtaactatcacccatactacggagggaagaccttgacggccaaccggggggcggtgaccgtgatcgccgataaggtggtgatggtgacctgcgagaacgcggtgaccgtgacctgcgagatagtggtgaccgtgaccatcgagaacgcggtgaccgtgaccaccgagaacgcggtgaccgtgaccaccgagagcgcggtgaccgtgacctgcgagatagtggtgaccgtggccgtcgatagggcggtgaccatcgagagggcgatgaccgacgagagagctctgacggtcgataggtattagccactattgtggtgttaggctgcctgggggagttcgatctatattgttggactgtctcacggctgccctgcgagtctcgattctcagtaaccctctcgagattgaccattgcacggggcttagttggaatggctggcgagataacagtaagactggaacccgagagtagtccagcgtctttcactgaattaccttctgcacgccccccagatagaatgaccggagggaggactgagccagtcgaggccggaggacaggtagatgtgttgatattggcctgtggtgagggacggggagctagtgatggcgcagtaagggcggaggttgaccgcccgacaggattcgtcaaaggagcctcacctagagacgaggaagtagaggcaatagaatctacagaaccgggataggtgaggttggtctgcggaatggactttgactgagtagattgcggaggggaatctagagaaccaataggtctctctggatctaagccagacgacgaaactgacctagtggagcctaagtttgaagagcgagacactggaggagccatggctgacgagggtgcgagaagaacatgttcttgtggctgctttgcagctttatcgtctatttggccaatatgtgtctttagtagaccggtcaaatcgactgggttctcagaagcagattgattttgggcttccagggttttgggacttgttacagatgggccaaccactgagatggtgctgcctatgttcatccttggtggaaattcagaaggcttcatcagctccatctgtgacaagtccggtggtcgttcgccccatttcttatcacggtatgcgcgcttggcacctgggcctgtggcgaaagaagataatattggctttgctgcttgtggggggcttttctggcgcgcagggagtttgtacttggcagtaattcttttcgcaagctgagatagtcgcgagtttggaagcttgcttgaggttgtttctgtttgtgcaatggaggttcttggttttggaggctcgttcctagatgttgtcccagtaggaggtgctgtttgtagcagtgattgacgagccgcattttttgatggtggtggggtttcagctggaacaaacaaggccgaagaagcggttgaatccacggagaggcgattgggagctccgtgagacgaaataggtggttcgggctcatgggcatctatgatatcgggattggccagtcgagatgattcagtttgggggaggcttttctgccgtgccctttgctctcgtttgcgccttcgctcttcttttcgcttttttgttttcttctccaacaacttcatatgcttctcccacgacttgagattgaagggagtcaccttgccctccgcaatttgtttctttttctcttcccagccatctagggtctcttccgaagtaaacatttccttcggctcccaactgcatctgtccatgctgtacccagcccactcaaccaaatattgagtgataaagactccttcgtcatcctcagaatctggttctacgtagaacctccgttccgcatggatgtcattcacgagatactccgcttcctcttcactttgggcggtagacgccagagagtcgacatcaccaactccagaggcatcattcatctcagaatcagatgccatggtagtagcctagaaatcgagtcaacaaatgcttcattgtgcagcgtccaacgccccatgccaaatgtgcaagcaagacagtacttgggctgaaactttgagttgcagggcttcggggagagcgaatgcgtaccgtatttcatattcattagatctaatgaaaatagagggataagcccacagagacaatagcagaagtaaaagtaatgcgagcaagagtaacaacaagaaagttgatcagttactgcccattgataaaggataccgcccgcgcgccaaacgccaacccacgtgatctccacactaatccacaatgggtggacacgattaaggagagacactcggcccaggtatcactgactatcccctgctgattctctattacctcccgtgtgttcgctccccttgttttctttctgcctgctgcgaaatcaatactgacatatctgactttcactttctcaaggccacaagtacacatctcagtcttcacttgcccgccacgtttacctgtactttgatactacctttcgagctttactagctcgatcacattcaaaatggccaacgacgaatatgacgtgagttgatttgggaccacgagttcctccatgtctcagaaccaaatgctgatgatgatatcctctacagttcctcttcaaaggtaacctcgccacttcacgccgaggcccgccctcgtcttatcccaccatcccacccccccctttgccccatttcaaaagatccttagactgactgcggaggtattgtggagtgaatagtggtgcttattggagactctggtgttggtaaatccaacctcttgagtcgtttcacccgcaacgaattcaacctagactccaagtcaacgatcggtgtggagttcgcgacccggtccattcaagtcgactcgaagacaatcaaggcacaaatttgggataccgctggtcaggagcgctaccgtgcgattacttctgcctactaccgtggcgctgtcggcgccctcctcgtttacgatattagcaagcaccagacctacgagaatgtcaaccgctggttgaaggagctacgtgaccacgccgattcgaacatcgtcatcatgctcgttggtaacaagagcgatttgcgccacctgcgcgcggtccccacagaggaggctaagcagttcgcaagtgcgttttccggaatcactttctctgtgtggcgctgacattcagtaggcgagaacaatctttcattcatcgagacttccgcgcttgatgccagcaatgttgagctagctttccagaatatccttacaggttggttgtcgactccttggaatttattataacatgctaattcgacagaaatctaccgcatcgtttctagcaaggctctcgactccggagagggtggccagcaggtcctcgaccgccgtcccgttatcgaccccagcaagcaagacagcgagcagaagccgggctgctgctagattacccttcgcaaggacgaaacagcgactgccatgactcttcttttgcgatgtgacattgagatggtcttgatctgtatctgtgttggagtctgaaatttgactgctacaaagatgatacacaggcgggatctgttagagaaaccccacgggaagataggggtctacccaaatcgatgttaccggctgctggattccccttcttcagtcctttttttttttttgctcgttttcccagtgatcctcaacgaaattgatcccctttttctgttcgcttgatatgtttctacgatggtgaacacagcttggctgggcgtctaacattgcggctgcgtggcttttgtatggaaattctcaaattcgtatattcattccacctattttagtgtaattgtacaatgttgtagtcatgcaatcccaacaaccttcgaagagaacagtggcgatgctcgtcattacggttcacgtgctccacagggcaatttacctctcctggccagtgtccactagaagactgacaacgctcgctaggaggggttttatttacaatttacaactaagtgcctcatgtaaattgaatatttcctggagttctgcaaagaaaaatcaaagccctcgcacacgtatgtatttcgataatttcaaaaagtcgacaaacaaatctagtttaggacaatgcccatgtcacgatcagccactgcagatctaaattctccaagctcgagcccacgttcattcatgacatattccagggtgtcaccaaacgtttcaccgttgttgcggaaccattcccctagggaccagacgtactcctctacctgttccttcagcaaagcatggtcgcgcaaccataatatttgaccaggatcgagcttcagcatgtcctgcataatatagtaatgtgggatctcgtcaccccaaccttcataccccggatcatgagaaagatcattgcgaaaccgagacctaaatttggctggcgactcggcataatttcttgggtgagccgtgtggaagaattgttgaatcgaggtatcagggccattctgaagcaaggagtgaccatgggaagacatagaagtagttgaaagcggtggataattgagatggatattgaacgagagttgctggctgctgtctggataacgcttgcggaatttgcgttggatagtcccattactaggacatatgtgattctgaacaatatcacccatgacgagacgcaaatcctcaatctcggccagctcttgggtggaccagttgtggagcaactgagcgcgctccaatatcacatggcgaagactacgagaatggcgatcataaacaccagaatggaatgcactgtgatacagccataaccggtatactgcgcggcgtaggcgtaatcgctcttcgtcagtgagcgagcgacgattctcgaagtctagtttccattttttgaacgggtagatcgtctcccattttcgtgccaccagaccgagctgaatgacttgtttcagaagggaatcagacatgggcgcatgtcggataagatgagcagcctggctctcattttgcgtcaccacttgaatgacatcgtcaaggggaccatattcggtctccgcgacactggctaggatatgcagtttgcttgttgagttgaggatgcggtgaagtcgatggcaggtgattgataaattcaagacatcggagattgagttgcacgagcgaaatatgtggagtagaagctccgtcgcaagatgatcgattcgcataatggaaatatgctatgtagtttctgtaaagaagaataccgttagagtgactcatgttaaaggatcaataagtgatcacatacctgctcaggggttgttatttgtagttaccaggtaatttgaaagaagatagtggccaatcttcgaggatttatgtatgaatcaaatttaagtcacgaattgaagcgatcaacactcgtgtacttgtcgcgcgtacggtgggtgggcctattggatatagaccccgccgttggggctaacaggaggaagagacagcgtgggatcaaaagtaaacatattggaagagcaagctccttgtagccatgtagggctaaccaccaaaaatgatgccatgatagatggtatcaggaggcaaagagagattgggctgggcaatggcgagggagtgctttatatgacgcttagctaatgttgccccttgcgttcttcaaccaacctgctttccagttattctgaagaaaaagctctctagacagtaatgaaacaacccaaaacgaggaacagatagaaataatcaacttttgaaattaaccaggatgagactttgccccgacgccttaacggaccatgatgaaaagcgtcgcatcaaatatacacatgtagtcgaaacatcatcccgagggatatcaagtctagaaatagcacgacgaaacaaaaaaaaaccccctatgcaaacagcttccttgtgtccaacgcatccaccttccgcacagaattctcggacagtcctagatcggagcgcttggccacccgatcagtctggccgtctcggcgctgggagtaacggccagccttgccctgtcggatgtcgctacggacttggttggggctgacgtactccttgttctcgtagatgacgggtccaccaaagctgccttcgagaatcacaatgggggtcagaacgaaccgggggccaatctcgactagagaaacctcgggcagggcgttgtccttgctcttcggtacaggcttgatagtctcttccccatcctttttcttgccagcctcagactcgcggatctcatagacgcgaatccagatcttgccgtccactccaaagataccaatgatgcggtcgacgaatggcttcatgcctctgacaccacgtttaggcacacagaagactccgcgcagcatctcccgaacaagcgcacggtattcgctaccaggagcgcccatatctggaccttgctcgtcgaaggagcgatcgaacacgaccaagccgcggccgcccttcaagcaattccctgcaaatccagcgccgagctcgcccattgtgtgcaagttgttgagatggaacttaatagtgggaccattgggagggcgcgaaagccagagataaagatcctggccgttcttcttggcctcgaggaagaagataacgttgcacgaatgcaggtcggcaagagagttcaggaggaggttgtatccagcggccttctttttcgtgtcgagcttagtttctttgtgcgcatgagggaggaggccgcagatatcggacatgaggtgtcggtggctagagaaaaaaaacaaattatcagatcagtaaatccttctagtatatctcaaggcgcaatattcataccggtaagaagcgcctctggaagtcaagataagtacccgggtcttgggcataaatccagaagcaagctgtttcttcacaacctcagctgcctcgccatcgtcggactcgtcctcttcgctatcggtggtgtcgtcttccgcatcgaggagctcctccatctggatgtcctcgtcggacatatcctcagtaggctgtctagccgccttctttgagacactcttgtagactgatgccatgatgacggttgattgtgttaaaaaatggaattgaaattgatcgtgcaaaagacggccgagatcaaaaagttgatggcagaatattttttgtttacaccgccctgaaccttgctatgtcacgtgtcatatgggctactgattcatttgccgttgtttaccgccctgttttcctgccaaacattcatctggggattactcaaccttgctttggtcttattacttgctacccacatagttgcatacatatgtagcctttcatactggccaccttacgatttgcttgcctaatttcactccaaaaggtagactgaaattcaacgaaccgaaaaatatatatttcttgtctaaattgagtcgacaacacaacagagcgttaactattctcgattacagccattttgtttcccaaagattgatataataagtggcagacttgtgcattggctcaatattttgactttgaattggtcaatttggagagctgacgagattcagtcaagtaaaaggcgagtcagtatgacggaaagttcaacgctctttgcaggtttgcaaagccctcttgtgtgaccttcaagccggcaatggtatttgcaaattccaatttcttccgaaaatcccaatcatgatcccgatatacgagaccgtatagcaagccagcattaaatgtatctccagctcctatggtgctatagactatcagtatggtctaatgtgtgctgtggtatatcggaaaggtcaaaactcactcgacgactcccatttcctcagtatgtgccgggacatgagcaaatttgccggtctttggttcaagtgctgcggccccgtcatgaccccaagtacagcacagcaaggatctttaaacgacaggttagattatttctctggggacttgaacagtaaagcctacgctccgcttgtcttcaatgattgatcccgcaagcaatcctcagcgcatgtatatccatttttctgctcaactattagatgtgcttgaaaaacgtcgaaaataaatcttacctgggcccagcccttcgagtagataacaacgtctgctgcgtctgcaagcccctgcaagcctggacgacctggcttttcaatctcaacactgattttagcctctggaaaatgcatccgaatataatgaatacattccaatgtgacatctggtgcacggccctgagtgcgagttagcatgattcatgactagttgagcaccttgtcaacatttaaggtacctcaaaatgaaaccagggtcgatcagttacggcatgtaagggctcaacagctgctgcgaactcggggtgggtcatttcgggtagctcgttgtaattgacaatcgtcctactaccggtggcctggctcgtaatgatgtaactagaagctggctcactgaacgactctcggtaaatgcatttatctagccaaacctcatttcctaggcttgattgtatttgttgagatgccatggatgatttggagggaaggacagcaatgagatttaaagatgattcggcactcgacggcctatattgtaacaattgactcaaaacttccagagtgtttggacaattcccaccgcgccggcgactgatcctggttgcacgtagtttctcatcttcatttgggtaatagggggctctaccaaagcatgtgaatactggactttttaaatgccaatttcaagacagctgaaagaactcacgttagaattgtgtcaaggtagcacgcccctatagccactaaagccatgatgataaatccggcgagaatatatctccgtatttcggaaagaggagttagtattagggccgattgatcgtttatctaatgaatgtagttgatcgagtcgaggataaccgctgctttctaaggttaggtccacgggtggggttaaattagtcagcttgtcattaagctcactcgtgtggtacaattgtgtttgtcttagcacaaaaagccgtttcctagttttgcagtacataccacataaggttcacaatgaatcaaagagtctgaagctttcgtacacaatacaggaaataatttcatgtagtcagtatctaaaatagactagcaatcctcttcttgccactgagaagattagtcgcggactagggtaatacgcatcacgtgctcatgagaaagagcgcacgtgcccctttgcttaatacaactacctaaccttggaagtaggtatctatttgtcttcgcgtgctttctaaaaagccataaagaaatgactgtaaacatcaagtttcattgaagtgcaggtataaagaagtaggcgggatactgcaggacgaattgggggttgaataacgcaaactagattgctatacccgtacctggaggcatgcgattcctacaggtattattgtctcctacatttgcaaagtacaaagcaagcattgatgtggctggcaaacaattctcatgtcctaatgatcctttttcattctataccagttatatagccgatctaaactgttcatgaatcctcccagtgtcctcacaacctcatttttatcattctgtcactgagaccattttttcaaccatgggtcagcggcacaaagttttagagactgacactcccactgctaagttcctctacacaatcatcaagcaattggacttgaagtcggtcagtttattacccaactattaactgaagattgatttaatcttatctgaatatgataggtcgattggaatcgggtcgcctccgatgttgaagtctccaatggtcatgccgctcgtatgcggtactctcgcttccgacagcagatggaaggaaacacaggggcaagcaagccaaagcgaaagagcaagaagggaaagaccatggatccacctgctgagatgcaaggcatatttccaatggctccgccgctcatgatgcccaccatggcatcgattgattcttctcttcctggcaatccctttgtaaaatgcgagcctggcattcagggtaatgcgaacctacagagctttatgcaacaatctccgcagttgatgttggaggctagcgccgaaggacagtattactttcctcaggattttgcctcgatgcagttccagctggcgtcaagcataccatcagcgataccatcacctagccccgcaagatcatcgtccttcatgcaaaatccataccagttcccgacaatgccaactggctatcctttttcatcaccaggcactcaatctgggtttgatttgcgggactttgaccaaatgaaccctttcaccagttctgctccagccatcagctgggaaccacgctctccttctcgccaggaaggcccgactatgaaagccgaagaaggacaaaaacagaccgaggaagaaatgtcgagcgcaggaaatcaggaagatggtcatgttgttgtcaaagttgaaaagaatctagaatgattatgttggagactagaagggcctcgttcatatgttcattagctagtactctcgttattactaccaactatgctgatttagtcttgtgctctctctcacttgccaaagctaaacatagtattgtgcagaatttctcagaaagcagatggtcatctttatttaggcgtgtactcatagaccaatctgtgatagagtcatgagcgttatttcaagggaggtctctcttttagggaattttttataagagaaggctgagaagccaagcctggaccttaggttaaagttataatgcaggtcatcaacgtgcactaacgcgacaaaccttgtattatgtcactgctagattgccaaaagaatatactaagagaaaccagtcgctgattaatcgatgctattgaacaatgtatttaaccgtctcctggggcgacttttttctcttcgtcatttttcttgcaattgagaattcggtttattttcatatctaccctcattgaaggaggttgtgaacttccttccaatattgccgaaataatgccttcttacaagaacaacccttcggatgaagagtatctagactcgatcaagaaacataccgacaaggaaaccaacaatgtacgatacatcgacaacttcagtgaaactttcagttgaacccacagtcgacatactaaaacttgagccacaggtcaatctcgcccgcgtagccaaggattttagctatgctagtggaaagtcgtttcagaagaagtatgccaagctaaagaaagcacacaatctgaccaacggccatatctatggcgattacaaggcaagccgacttctatccgtcctaataagattgaaactaattttctcggtcagcctgaggcggctcagactcccccgaagaaagccatcaagaccgtcacggagattgtgcgtgaggctggggaagcatctgtaaaccgacgttccgccatgctgaagggcaaaggctcggagaaggataagaagaagcaagcttgacttgtcaaaacttgagtgaaagagttcttcggtgtgcgaggattctacgatcaggctgaaggatgggcgcccaaaagatgatagcctctttggaagtgtacttcttgatctttagatgaaatactgaggagaccgtgtagtaaaattggcgaaaattaggttacgaacttcgttaaaaggcgtcctcttctctcctctcggttctcaaaacggtataactacgagcgagcgaaatgtgaaaaccctaaaatcatagggagtggttcaatttggtttaaaagacaatccttcaatttggaatcgacccagacgatatttattcctagtactttatatataaagagggaataccggcttttgatacttgatggccacggaagtcatttaatacctgaattgaacgaaatttgcgagtaaaataaggtgataccgatatgtatactagcgcattcatcttatcttttgcaacctttaaatattagctgttttgcggtactgaaacgtgcgtacggtcggatggttgaatttaagatacggagtaggattaactatattaataaacttgacttcctcgaagtatacccccttctacgaattgaagcttttaaatcggagacgattaaaaatagcttcttagctgctggtctagtaccacatgtgctgaagaacccagtgtccggcatacccgacgggtctgcttttgccagtcgcactgagacgatgctatttcttgcgccgtcgaccgtcaaggcatccaagaagtcgtatttgtgccgctgggctggctgcaagacgtgcgctgtcggtccggatgttgtcactgtgcacgccgactgtctggaggtgtatctggagcatgcggcaagctatgaggagcggaaggagccgacaaaggaaaaggttggaaatgaggacaaggaaactggcaaaggagatgacaagaataaaaaggatacaacagacgataagaagataaacgaaacggaaaatgccgccctgcagcgcctctggatcgcctcttcgtggcgcacgccgtggaaaaaggcgcccttcctctccctgctccagtgcgacaacgcgcggatgtccatgcccagtccagccttgttacaccgccttggtctgcctggtatggcgcgcatgccaccagagctggccagtaccgtcagggacctgagcaaggatagtcctttgtggcggctcaacgcggccgcacgcctggcgctgtcgcttgccgagtacgagaagacggagacctacggtgacgaccctgccgcactgcccgcgtctatcctactatccgaggtggaagcctgggagagaggccggctgctggtacgccgtgtggtatcagacgagaagaaacctgagttggccgaggagaccattgcaacggacagcttcatccgcctcgcgatcgacacgtacggcctgctacacatcaagcggctgccggcccgtccggcctacaacggcaccacgtccgccggtaagctggcctatacgctctgcgaggcgaagacactaaacggtgccatgttcatttccaggtgtgtattggaggctgcaattggtgaaacggacagccggtagaatgctaacgacccagctcggcctcggccgcattgagctccccgcgggcctccccggcctgcaaatctgggacacgcctgcgccgccgcccatcgagggcgtcgcttatatgcgaaaacacctgaagcgcgtcagccccacgtcgtaccttcatgtggtcgaccttgaagctatcaccggtttgactcttctgtccgacggcaacgtgctaggcctccacgcccacacagtcgccgagccatccgccacagttaccgccgcccgtatggcgttgcccacctcgcgggttgcatagcagtatatgtcactggcgcccgggatcgcatcgaggccgtaggcgtgcgtaaggagggctacagtccgcaactaactcaggacgaactgacgctcatggtgagttttgaacgctgcggacgatgctgtagagaaaaatggtttgagagacgcttatattaattttccccgccagttccgcaagcggctctctggcgacacgctcctcggctacagcttttacaactcaccctccgaaaccatccttaccgcgccttcagaacagccgcgagcgctcgtatacagcgccgtcaatactattaatggcgtcattaccgacgtcggcgtctacaacgtggccgccgcgcccgacgtcaccgcggctgcttgggctaccagcgtacgaaacggaacgcgccgccactgctttaaccactcggcttacccggatgagcagctcaccgaggacgccttccagagcaacgtgccgttggccggcgtcacgtatatgcaggtatacaccaccaaagatactagcctcctgcgcagcatcatcctgacctacgacaatggcagccagcgcgcgctcggcatgtgctgtgtcgccaccgacattgatgccgtgcgcgagtacgcccgccctgtacgcctctgctttaagagtaaccgcgagacgggcgtgacgcgcttgcgtatcatcacagagggcgacctaggtacgccagccgccgatggccacgacgactgcgcaggcggcgaggatcccggcgagggcgaggaggccgatgacccgtatgccgttgtgcgcgcgtgctgtctcatgaccggccgcctcgagtttgccatcgacagcgacaggctttgcctggaacactttgccgaggaggaagagccggacgaggagaaggacccagacgacgaagatgtggatgtgtggtgatgggaggtggacaccgccagcactatcaccgttggagttgaactatcttgtgttaagccattagggaaatcacgactacgacctcacgtctaaaacgaggtaaaattggattttaactcatcctgtaaatctatacaactagctgagcaacatccaattttttttaatttatttcctttactcgcttctattttcaaagttgtgatgttgtcgtcgattcctacttcctcgttaaatatgttaaggacgggcgggtgtgtctttaggggcccgcctctggatttagtttttaggtaatggtatcatttgagtcttcaacaatgataatggggccaatctcctcggccgtgacagactgccaggaagggtctccggggatttcaggatacttgtcagagcggtcgaactctttggcattcttcacaatgctgaagtagtatctcctgctgctggccgtcaataattgcactaaaactcatcaaatccttgaagaacttacgctgcttcggggctcatgttgatgccaatatcaagtgagacattgtcccagtttatctatagcagccagcacgttagcaggtatattggattgtaggaacagattgtgaacatggagatattgtgccgaaactgaattggatgctacgtacctttgccttaaggcgatggcctgttcctcgggcgtattaacggaagtcattctagtaagaagatgaagctgagtcggatgttgttcgatgtaaagaagcacgtgatgctagaagttaatacgtagaatgtgagaagagcgatggagctaaggacttccagttgtctttagatagccattcaacgcgcattttgcttgatctgctttcagctgacaggtgttggctcctcccttaaactaacgtcactcattttgcctacatacagctttggataacaagaaaaatctgtgatgttcaatattataaaagatgacatggttatagtatcttaccaagtagggtgacaaaagtactttgattggcctctcctaggcatacttttgaagaaaattttgatatcttttatatttctaagagaataataatgatatgaagccagacaccttgaagccaagcagtcaaaattcatatctatgtctcttggtaaggcatgcattgcccatggtgtgactcaacataggcaacgggtacagaggtaacgaatttcattcataaagtcaaacaaacagtaggattgaacttatcaaaggggtatccttccaaataaacagaaaaaaaaagctgcaaagtgcatatcacatcacaaatgggtagagacagctaatatcttgacataaatctaagagagatcttcgttgagaagcgttatatgtctgccatgacagattccacgatcttccgcttgtatttcgacaaagcctggtcctttttgtgcatctgagtacggagtcttgtgtaacgctgcttccatgttgcctcggaaacaggatgactagaatcatcatcgtcaaaatccaggtttgccgtcttatcattgtcaatattctcattactcgggcccataatcacgtttgcatggtcaggcgaatccttccttcccatactaggattgagttttgcgagcgtgatttgcatcgaaaactggcttgaagttttgtactcatggaagacggtatagtggatatcactgaatgattctttagtggcagggccattcctatcttcatcgctgcttggtgtcgcacgttcaacgttgataaccagtgaccctggattagtgcctgcgagtccgaaatgatgaccaacaccaagatgtaaggccagtagcagcgaaggagtcccaaggtaaaactgtgaatataatgacgacaaattgatcaccatctccgaagccagagcagccgcctcgttaggagcaagattcgccgtctgccctgtcagcctagcacgaagaagctcggcagaaagtgcatgaacaacctcatcaatggagggattcggagtaatgaccgcatttctttgccccccagaagaagatatttgagtagtgataccattttttgtggtatctgtggtaacatgttggcggggctcattggacccttcagacccgggaacgacagcaccattcacaccattgactactagtctcggtggagaggcaagtctaacaggcgcccctgaatgttgaggaacctgcagttgaagtctattgggcctcccctgagagatagatgttgaaggattattgtgagttggggtctgaaatatttggggcggatttctgtcaagggcaattgaaggagcctgagtattagaattgggtgcctgcgatgattcccggctaggattgacctggaatgtagaaaaggaacccgatgatgaccctttatttggtggccttcctcggcctttcccggctgataatccgttgctattcggccaagcagacgaaactgcagggccatgtcgtcttctggaacgggttttttcacccgttgacggagtaactgcggaccgtggttccgcagacttgagtacatctgatggtagatgacttcggggaatgatagcagactgtggataactagcaggagaggcatcccgttcgggatgtctccagcgtatatctggattttgctggtccggccttgaaccattcggaaacgatgatgtcgccggtatccaggggtcattggattcagcatcatcaggaaatgcactgaatggaatcgcactctgtgggaatgccacggagtgggactgaaaactaccctgctgctgggcgcccacagatgtgtccaactggggccgcttgattgctctatcttcctcggtgtacctatcctcgacccttttccttcccctctttggcttccattgtggcacaagtgccctgagtgcaagatcctcttccaataatacaccatcgcgagattcgctaacaaaaggaccagatggtgggagctgtgtatagtaagaatgaggcagtcccatacaatattcaaagaaagcatcaatatgcatagcacgcatccatcgctgggtgagattagcaaggtgaaatttgggttggaagcttggcagacgtactttgaggcgaacagtgtactgttgcaccttctgggtgctttgtttcttttcaaggcaaggtggttcaacacccaactcaattgctaattgaatccaggtcttcaactcttcattctgcagccgccttcgaatgaggccatatagggtaaagatgttgaagctttttccatcactgcgcggcagacaccggaaggtctttctcagatctgatgtgtcaaccgaggatggaacattaggattgcagtacaagataaatgaaacataggcgtcatcaatcgtttcatcagtaatatcccgtgacggaagagctcgggaatctgcgtgatcggcagaatctttcataggctgatggcgacgaggatcaaaaactggcggagacatggaggccccggagcgattggccgatgatgggggtatagcagaatgcatgcccctcggggaagactgtaagctcctgggggtttctcttcgctgtaagggaggcgatttgttgatatctatttgactacgagagcttcccaaggaggaagcactctgcaacgtcgattccaaggtcggaggatatcgcgcatattgttgaatgaccatttgcggtctgccgagctcaccacggttggagcgatcggtagagtccatcatgagaggaaatgatgttttcatctgaatcttgacgactcggagtgtcagaactctatgtttaattgtagaatagagctagacacgcgatgcaggcaaataatcatgcggatcctatgtcgcataggcaagccgtcattatcgtcaaatcaggaaccgcagcatagatgtaggctatcttcaacacaaaatgatcggtgaatgaatacaaagagagagtgaagagaatctgattctgaacagcaatgcgccgatggtgtagggttccaggaggtttcccctcgaggtggctggaagcgcccatctttaaagctcaagctgagaatctattttggggccatctagtgctccctaatgaggactagtgttgtggcctgagggcggggttcatgcctggatatcacgtgtagactaagcctaattggcgttagcgcccattggcacctaccaggtgttatcgataagcttgtcgtcttggcattcttccaaggttggcctcttcgacctcatccgtcaaaggaaccggactcccccggactgtggcaaggttcaatttgaatgataattatttcagaattttcgcgccacaagcctagaaatattcatctccggcttgtattgttgcgcgcgcgacgtgcgtacaatgtcgctcgggtctctgctacccactctcttatcctagcgcgaccttatccgtcatggcgccgccctcgagttcgcgctcgaggtccactcgccctacgcggtccagccgcacaaaggtgcagacctaccacgaggaaagctcctctgacgatgaatcggaaggtttgcgtagctcaaggcgtgcctcgttatctcttcgctcgcgaatgccgaaatcctatcgtgaagattcaacggatgatagctttgattttgatggagctgtggaagaccaggagtccgaagcatcggtatctgcgccgatcgacaccccaaatccgaacaccgaatctgtgcctactcgtccttccaaacccaaacgtcctcaacgcgctgcgaccacctcgaagccaaagcagactaaacgatcgaaacccaccagtcaagttgggagagccttgcataaacgtgtcaaggcagatgaggatgacccgatatttctgggatccggtgtcattcctccttggcaaactctcccctaccaaattcttcttgacattttcttgcgcgcgtcgtatccattactcgacgaaagccgttccgcccgcaatgactctgtcaagtggctagtcaatgtcgctctactatgtcgaagctttcacgaacctgcgctagccgcgctctatcactgcccccctcttcttcctgcctacaagagccatgtgctcctctctttgctggcacgaccgcaagagtccctctcgatgaattactctagcaagatcaagcaactccatgttgaggttgaaccagtcctcctctataagagtggaccctacggatacctcgaccttgctcagctgattgaaaagacacctcgtttacacacggtaagactgtatcacagagatgattacacagtgggaatacccccatggcacattgctcaatcaaagtggacttatccagacgccatcttttccgccatcgagacccgtggcattacccttcgtaactgggactggaacagtcgctttttagaaaccgacgagcttgtcagattgatggtgagaatgcattcgctgcgtgccttccagggtctcaggcagctgaagttgctccactttgacaattccaacgaggaaacctccgctgccaaggaggctgctctccttgaagcccttgatatgcttccagagcttcagcgactggattttattgaaagctcattggtcagcggggaaatcctggccaacctaccaaatacactccgttcactcactctgaacaactgtgatcgattgtggtcatcagatctaacagcctatttgtccttgcatggcaccaatctccgggagctcagtctcagccacaatcgccatctcaacatgtctttcatccaaactctggctcagtgctgtgagagcctcgaagttttcaaaatggacctttctatgcatgatgcgtccagctatcacgatgtcgagccgcacttcgaagatctacttgtcgaaaccgaagttcccacgtggccagtgaaacttcaagaaatcgagctcactcagttacgcaaatgggacgacgctactgcggaggtctttttcacctctttggtaaacgcggcaccgcaacttcgtgatctacgtcgattggtcataagtgcaatcctgaagattggttggcgtgaccgtgccacttttcgcgagcggtggatcggtatgctcgagaaggttttcctgcgacacagcatgccgccagaccccaacctccgctcccttcagaagcgctcgctcaaacccaccacattcatcacagcgaatgaccccgatgaacttggtgttggagttgatgatccacggccatccacggctgatggtggcccgtccagttcttctaaacgccaaagcactcggctggcacatcagaagttcaacataattgacgatgctgctagcagttcttcgttggtgcagcctgaaaccaggaagatacagggaatgtgcgatattgttaacattcggatcgacaaccagcgaccgaccgaactgcaattcaacgagaatgattttcttgacgatgaactcagtggcgacgaggactgggctggcgatgacttctagccaatcctagggagttcgggtaacaagctatggcgaagtcccaaccacagtacctttctttgtatttatagccatgtcgtctctcggagctgtattatgaccctagacgaacaggttcttttttttatgccgatatgtttctgggatctggcgctggggtttcttattcatttggaagggggttaaacaggagctactattcgatactctctatacaattaatacctagcgattcatgcgactaagtatttggtgcggaatacatgattgcttgctggaccataggcatacaacatgtcgtagcagttgcgttcatgcgttgttcactcggtctgtgcacgacgatccaaagccaagccccacgagatcgtcttatcggcgagtctcgttgaacctcaccttacatctgtttattcctacacctttgtttggtgtataattacattttatccgttcagatccagaatttggatgtcttgtgcttttcctttcgacattctgacatcggctggatcctgttaggtccaagatggcgcctgaggcccctgcggacaccgcaggcccatcctccccaccaccccaacttccagaaggctggtaagtcaaccccaaaagtcaaagaattttccagctgtattctaacaatcatatcggataggctccctcaatgggaaggtgtcggacggaaatggtattacgtacagcggacgactgggaagtcgcaatgggagattccgaccgaaccgatcgttttgaccccgtcaacaacaccgacgccgagcggggcagggctatcgcaggagccaaaatcgtatccgacaagcaacaatactcgagagttggagtccacggacagaatggcgggcgagatgtactctgcggccgacagtgcgaaaatttccgtagggaatcgcgctcattatgtctgcgtaagcattgcaagaatggcactgatggtgggatagaactcccttggctcccagatatatgggcagtcggaaaatccaacttatgggtcttccggggtaccgggttggtattcgaatcagacgggtcaacacttgcccggcagatatgagcagcagatggctgcaaacgcagccggatatggcccggtatgttcaaatactcgcgtcattcattgattggccgtggcgctgatttgcctctagaatccgttgcaccagggtcctgttggacatttgaatggtgttcagccggcgttctatggaagccaaacacatccaggttatcaaatcacgggtccacaccacataggccaaagtatctcctcatcaatgtggggtaataattcaggtacctatcagggaaacccaggcagttataacatgacacaacatgcacaatccttccaaggattctctgctgatcctgttggattgcataatcaccagccaccagcatcctggacaataaccagcaatccacagggggaaatggcaaggtcaattggcggagcttccgattcccaaccacagtggcaattggaaccacagcaaggtcatttgaatggctctggtgagggtgtcccgatgaacctacacccatcaaacatgactaagcccttctttgggtcttactcatcgaaccagcatgcggagccgtcttcgagagaattcgctcgtcgtgtctcgaatccttctcttgttcaggaaggccaaccctaccaaacttccgcggagaacttccacaaccattcaccgcactccatggttgaacaaggtagattcggacaaggccaggacccacgttcccattcacagcgtactacgtcggaccctgctttgcagggattctcaccgctgcaacatgtacagagtcaatatcaacagcagcacatgatacgaaaacagtcaggaccacaccaagccaatattgctcaaggccatcagcaatatcacaatccaatcgcacaagtcggtgccaaccaatacgtttcgcagcatcaatttggtcccaacggcgggccgacgggtttccctgaaacaacgcatgttcagcaagtcccttatcaccagtcgagtcattatcccgagcgtattgaacattcacccgggcagacaagaagaggttcagagtcacactttgtcagtgggccgtggacctccacgccgccttctactggacagtactaggcaacaatttgttgttcacgttcattattatggtcaacgggaacaaaggttttaatttctttttttgagcggtttctatgggcatgtctatcttctgcgctgtttgtgtttcagtatagattccccagtcgatataattcgttgcttcaattgagttttgtgccaaacaacattccgtctagctactacaaattcccgtgcctgaacacattacagctgcaagcattacacaaatcaagtattaggggacttcttgaacctggaagtatagcggcctacataatatcaggaacgtcatgtaatccaccgcctgggatagaacccaataagtacatagcatgaggttcaagtcacagatttcatcttgatattacaaaggtcattgctcgcgcggaggaaatctcacaaacggcatgtgaggaagattttcattgttctcttcattttctctaccacttcttctttctacgacatcaccaatatctcttggtcgcccaatcatccccccttccatcccacgagcttttgctatcacaatggctagtacctgggatcacgaaagagacaagaaggtaagtttgctcttttcagggggtcagcagcgacaccccccgggatacaagttcccagcattggcaaggtctcggtatcaatagctgataattgatagttgcttttagccattatagccgttcattctccgctggattatgccgcaattgccaaggcgatgggacagggtaagtatatacctgaggactatacactgaagccacaattcccaccctaccctttatcctacatgaccattatacgaactcatctgacgaagtacaggcgacagcactgccgctgtgaagaagcacgtctacactctaaaagcccgccagcgagcaatctccgcacaatctcttgccaaggccaagaccgacaaacccactgactgtggcgacaagggtaccaaaaccaccaccaagcgcaagattgactcgcccacaaagtctgaagttaacgccattgtcgagaatcaggacgaggatgggtttgaacccagcgccagccccaataagcagcgcaagctctaagatcttccgcttcttgggcctggcattcattgggaggtaatgacttacattctgatttttatgcagcgttttctgccgcatagcgaggaaagatgtttttcggcctttggtctagggctcttaggtactttgttatctgcgtgatgtcttgaaacacagcacctttttcgttaatatccatttcccaagaaagacgtagatttccttcgtcgcagtagccccccgatgccttttcagtatgaaaggtactaagtatctacgtagaaccaggaaatataacctcaccgttgttttatgctacttctgacaacccaaggaactgatccaagtaatggtatgttttttaatctttggttatcatcttaagattttcccgtttcttcatatcctcctactcatatatatagttccacttcataaagtcaattaacatcccactcttagtaattttagagatggcgatggaaagtaaaagaggatagagccacttgtttgtgccccgttcagtttcagtcgaacattccccctttcactctccataaattcttcctctctcttagaaacagtctcctcatttcatatcaccactattttactagccggtacgttcattttcaatttaatctatgagcaggatatacttctaagcatcttgagattcaatttatgctcttgatttactcgtcacttttgttcataaagatactgatatcctttgcctagctcgttaacgaccgaagcaacaatgaaggtcacgtggaatgaaaaggccgatgccaaggtaagttcatatttaccttcgttatcgatttaccattggtttgttccatatccttgatagtcttggtgactgcggttcaagcggtcaccttgcggccttcactttgacgttggtgtgacccgtgacggcgatggtttaactccaatgctttaatattggtctagctgtctcaacatcatcgttgtatttcaataattaaccatcataactccagttactggccggcatactcgccaataatcctaccccgattgatttcaatgctcttgctgagtatatgggtgatggttagtgctaccctgagaacccccaactcccatactgcagtctttactcggactatagcgcatattgtttatgttatgcactttattcatggccgtcacccaaccaactacattcccactggtcctctcccgtttgatctttgccatacacaattcaacttggaaatatgtttcaatcgcctataccctctacccaacatttttcgggctaataaaggaactatgctaagctagacttataggagtcacagcctgcgccatccggcaccgggtaactcgccttcgggctaaggctgcagagatgaatgatggcagtagcacctcttcccctgcttcgcccgtgacaaggaagcgccagcgcaggactccaaagaagtctgcaaaggttgcaccggcaaagcacaaggatgctgatcccgaatctggtggagaaggcccagttcccgaggatgaagaaatcgacggtgaagataccaatgacaagaagtgcaaaataaagcacgaggagactgaagagtaggtttctttaatttgtgaggatacagatggaaactctgagtactaattttgtttgatcaaggaccttcttccttgacggtatcgtcaaagaggatgaagattcctcggatctctaaacgccaccaccgcgactcttcacagcgaagccctaacgcgtcgatgtggtgaaggtgtcagcatggagatagtatctgaattttagctggggaagtttttcagaatctcacaaccggcaggaatactagcatatgcaaaagggttatgagcagatgaatttacagcgaacaatgagctcgactatacgtgtctccttgctcgtaataaaatacttttactgatcccagccattatccttttaacttcatacgacaagaacaggataaaagtagacgacaaaaaaagtcggctgtcaattcagctatgtccttcggcgcaatccaaataaatgggcaccgggcttttttttgtatttttttctttttccccccatcacctcacggtggaaacaaaccgagttgttcatcaaccttttttttttcgatttttccttcttttctgacgaccgggtcacacgcattgttggggaataataaagcaccccaaaagaaacaaggagacccaacgtcaagtaaaacgcaaattcgaatattgaccacgggggctcaagtcaccgaaatctcaagcgactgacatgaatccgccttgagaatgaccattgagctaattgagctggtcatcggagtaggcgtcctcctcgttgtactcggtccattcaggatcgacctttttgttgtcgacatcgggggatccctccttgaggttccactgaagaaggggggcgagaccctccaggccggcttcctgcttgatagcggactcatcgagagaatgctcgtgcttcgcaggcaattcttcctcttccctgacattgacttggtcttcatcggcgatggcgttctttgtgacgcgcttgcgcttgcgggaagagccagcaggagtaggtgtctcattggcctttttgcgaggggcacgcttctttggagtaaccgggctagagggtccagacaccgccgcgacattgccattacgaacgttctccctgattttgttgagacgttccttgagagcacgaggtgttggcctgtgatcctcgtcctcgacggctgatcaaatgttagattgaacatttccagtgatatagagattagttgtggctgcagaacgaaagacttacgccaggcctcggcaaccttggccacatcgacactcaagtcatgggtctcgaggattttggcaaggagctttatttgtcagtcacaattgtcattgccagatatgcatgcagcccatgaacatagaaagtcccagcagacttggaatggggaaagaatcttgaaaaagacaaggaaagactttcgcaaacaaatttgtccaagcagctgaggatgatcaaagcaaaagtcaatctgaaaggcatttgatatggtcatgcaggaaagtatgaatatccacacccctccttagacaaaagcccaggacaattcaaaagtcatagcgaagtgaaaaagaaactcacagtttggtcagcgatcgaatcccatttcactttacccatcttggcggtgtgaacagtttgcggtagatagtatggcaggataaatgtaagcttgatatgtttcaaatgcaagtcggttatgttctcgtgaatgaataagaatggttccgagttgcgttgggtagaagagaggaggaggaggaggaggaggaggaagatccgagcaaacaatttaaagggatcagattaacgcgactggtcgtagattctcggcgcttagtcgtcgaggcaaacgatacaaacgaacctacgcagacaatgtgacttcacaggtatgatttcaggtggaaatccatcttagttgtgtagatacactgcgtagtggttatccaacgttggttgcccatgatggcccaggcattaaaatccagatatacatgaatacagtatgtagcttctacagttcttcgtttgtcagtatttacaattatgtttacacaacctaggatctgaacttgggataactatacagtgcagtggtggattctagtacatgatgactaagcggcaccactgaggctaacgcagacaccttccacttctcttcttggtagtcaccccattgtgttctcctctctagtaccctactgatcccagtgacgactatgctctcatatttgtttcataggcagagctgtcggtgcccctgcttgtcccctcttcaataggtgtctaagcaggagccctaacgctagactcgattaggcaatacatacatcaaatttacatacaacgctagaggatccaccaacggcgtagatcaacctctctgcaattctaacggccctgtaggaaatcggagactaccttcattaaaatagactaacaagtgatctgtctgatttggagggaaataactatgtaggtggctattatggcgggagggaatggtttgtcctcagttcctcgtttggtccgtcccacatcgctctgatctctaaacaatattcatatacgacattatatattccagtcattcctctgggcatctttaggcctgttcattttgcgacacgtcttctcataatccgagttggggccagtggtaagtcatcttgcccagataagcctggcgacgcaagaagacggttgctgactttattcactccatgcttagatattgctgaattacgggcgttcttctcaggctcattttgctcaactgactcacggatgcggttgaatccagcagggtttcgtttacccggataaatgggctgcacattttcataagctccagaggagtcggacaaagggtcggggccagagtcgactattccatcagcgggagaggctagctggtgatgcaatcgtttggagacaagtttggtacgtctcattgtcgaaggagatcggtgacggtatttaggctgcgatacacgttggggcgatgttgatcgagtgcgaggctgagatatgagaagggattcaaggttccgactggtgtcttgggttggctctgtaacacccgggcttctttcgatttgagacaaccccagggtattcgaaccccgcgggtgcaaggaaggcttttgtgacagcgtgagttgtttcctgacgtatgaattttgttccgatagggattgatgagaaatatcttgatgattaggttcaatcaccaagtcctcaatcccgagcttgctagcatgagaagcatccagtcgctggtcaacttctggagacttctgccgccaacctgcagcccgccgcttcacagacaaccatgaatactcgcgaccggtctcctcgtgaaaccgtgacgcgacatccaaccagaacttttttgctggcaactcgccattggacaccgcgggcaatttttgttcatagagtcttttcagaacgccctcttgcgcaagggtaagtttcttgccacggccggtgctggggcggtgatcgactactatatcgttgagtttggtcccacgggctgacgcaaaatctattgaggccatcgctggagccggtgccgagttgtggggtccttggtttaattgacgatcatctggtcttgttcatggggacgtcacgctgccacccggtcggatcgattgacttgaattcaaatggatagcccactggacccacagatcaaggagattaagaatgtcagtggctagattcgagccgaaggaagcgtggatgacactggaagtgggtcggaaagatcggaggccnnnnnnnnnnnnnnnnnnnnnnnnnnnnnnnnnnnnnnnnnnnnnnnnnnnnnnnnnnnnnnnnnnnnnnnnnnnnnnnnnnnnnnnnnnnnnnnnnnggcgcgccgcgtgtcgcgtcgcgtttaccccgcgttttcaatacggtcacgtgattatcccaaattgattactccgcataggtttcaattctatctagcacaatctcgagcacgtttccactcataaagagtgttgcgggggactccgactggcgatacaattggctttggacctggagatgatgataactcaacacacaatatagcagttcgagcgcttgtgtacagaatatcagcagcgtccttgatcagcttcagaccatgtgaacaagcttagcatctgtagggtcttcttcaacatggacattcagattcaatgtgaggggtatatacgtatatgccaacgatttgaacatgtgtcactcaataagcactctcaagaatacctcccaacgccaatagacaagtaaaattccacgtaatcagcattcatcaactcaagagatcaaatctgtcggaccacctaatggcaaagctgaatccattgtgcaataatatcctccatgtcatgcgcaataccccactgtgaagacaagcaccggaaaagcttttgcatagagttgagctcgtaaagcagattcctgacaacgccaccaataggaagtggaagagaggaagagctatttacattctcgacaaagcgctttgtctccgagccagatcgaggtcggatatcctcgtcacccaggttgagatccgaatgcgatagcaatgcatcttgccaaacgatgttgcgaggtaaattcacagtggcgactcctgcgagtgaaaggacaacgtatattgtcgctgctgcaaacagggagctaggcatatgcacgacatgcgcgcggccacgtggtaattgctccacgatatcttgaatggcgaccgcatggaggacggcccgccgcgcgtcttctgaattagcccatttgattagatcaaagcccgggcggacggttccacatccaccggagatgtgttggatgatgttgtagcgcgagcagacgtggcgggagaggacggtcgagttgatcattgtatctaggcagactgtgtgccaacgcaggagaatttcgagtctctctgctgcggtgaagtgaatgctcatggatattgtctcgtggacttgagctaaagctcggcggacgtcagattggctaggaactcctacggctagttcattgtcatcaaaatcggagatcaaggactggagcccttctagcaccacacgcagtgcgaaggcagagaaatggtactctagagtccggaagctccccaccggtgggaaaagggagcggaaaattgtcctaaatgaggactgatctggttcttgggggtgcatgtgggccaaccattcatcggcagtgccggcatcaaaggcttcctcgctacttgggagggtgagggggtttcccacatgacgagaggaggcaccatcgctggaagtttgatccacgagcccgtccaagacgtagtaggctaacagggtgcgttgctggatctcccgcgcagcccagattcgccactggtgttctttttctgcagcgggagcatccatcgagggcaagttgtccattgagtatggctcgctgtcgtacatcccgcagtgtcttgcccataagaagcccagtggatggaatacttggctggtggttctaattgcccggttcttggatagcgccccatagatctgacccagtagtgctgtgatcatcaactgaactcccttgcaggcatcatagggtccattgtgtgtgatcagagactgccatgaagttgaaattgcggtatgtgctaggtgccatagggcttcgccttttaaaaccgagtccttggggcctaggtacaaagagccaatggcgatggcattaaggaggagagcatgcgtgcattctcggaaaacaaaagttgcacgatgcaatattgggaatgtgggaatgaagcgggcgaagaacatgtggagacactcgtcgaggaagaccgaggtgatggacatggatttgacggcggccgtaacactcgatgactagggaaataaagtgtcagtttcgatcaaatctcggtgcaatatgtcttatgatcaaagttttcaacagccctagtttgctcatccagcaaaatacaacgctcaactcaccgagctcgtgaccatctctgtgacatctcgcactgcttgatgccctccaccggacagtatcgccccaacagaagacctacggtcatcgaatgaattcggggacccaaaatccatgccattcatatcctgcacgacaggtggaaaaggcaaggtaccaagcggaatctgccaatctgtcgtatccgaggacattaagctctgaaacaagttttccgaatcaggccaaaccaacgcaaagtccaactccgagtcgacattatgcatactcgcatgatcgccggagtgggactcctccaaggaatgacttgttgctgaagttgacaccggatcaacagtggaagcactcctcgtgtcccaagaagggagagaattgaaagaggtaggctgcggcggtaagtgggcctccgaatagtcattctttgcatttatagcacgaacgtgcagcttctcatgccgagtaagagcatcttgtcgggcaaagggccttcggcactctttacagatgtatggtttagatcccgtgtctaagttttccggttagctgggcattgctttttgagctttctgtggggatcataaattattgggagccctgatgaaattggaacatacggcagcgctcatgtctctataaagacccattagttagctcgtatcacttggcggtccctccttcgtggggaagtttgagttggagccaacgttggaagtctactcaccctcaagtgttcggccttggagaatgctttttgacatactcgacaaactagtttcttgcctcctggcagtgcaggcggcgccgtcattatccctattgacgccatttttgttcgataaagagaaggggcagtaggagagtaaattgtggagaggtgattgtggggtgtggcactgcttatgcgatcacggaatttcattttgcctgcaaccccaaatagatagtcaagttgaaatatatagatactctagttacatgaatgttgatctaaaatcaagcaaatgaagaaagtcaactacctcattttgcaaaccttcgtgatttagaagaacctgtgctcccagactgagttcttatgttgtaaaataatgccatagttgagcgtccaagccttcaaacttttattacgccaatagacttattgctacgcttcgctccgcagttgtactaactattctttctcttgcttcagctagttcggtgagaaaatatcatacctaagtatcctttgtatggttaagtcatacaaaagatacctagcttctagatcttgggtctatgtttatggtgttgcttggcagggctgtcccttgtaagcgttcaagcgttcaagcggaaacatcggtcgtggcaatacgaccaaggaagcgtggctactatgttccttctccccctatttctctagactgcatcagatcggcaataatgctcagaccaagttgcatatgtgtctcgcgtcccgcggctggcaagcagcattgaaaatgccgtcgcgattggggtttccccagctgaacggtgaatctagcgaaataaattgctaaaccctaggaaaattgcgccaaggcgtcgaaatctagagcttcggtacttggctcgggatgaaaaagtcgaactgcatagtaaaaagcttcatcggctagccgtgttcaagtgccatggcgatgctatatagaagaccccatgacagcaatttctttagcggccttctaactcgccggtaccgaggctttccaatcaggaaccgtggagtgcctccgcatttctcgccattttctccccattttctcccccgaggacccgcaatggagccgaaaaccccggagaataactaccccaggcgcaggagagctccgactgggcaaacgcggtgggattagtgtcttggctatgcacactcactctgacatttctcagaagccttcagatctgtggttattagtgtttgccccggtgccctcaagtggctcaccctgagccatagtttttcctgtaatcctcttatttaatacccccactccctttgactattctcacgacaatcgacacatcgcctggtactgagaccacctttttaatcgggggaacgcgagcagaatgccgtcctttgagttgcaaccgagctcgtctcgacgagacgagctcgaggaggtgccaggcacgaaagcggacatcgatctcatcgagagcgcaggaaatggacacgcagtcacttccgtcgagtcaatggttgctcgtctgccaaaagcacaccgcgactatctgatggagcgacacgggactttggaactcgatcctattcccggaatgagtccagctgacccttacaactggcctgagtggaaggtaagtcaatattctccctgttacaaaatcttgaaacgggacaaaagcaaatgatcccgtcggacagaatactgatatgtcaacgcgcagaaaatgaccaaccttgtcctcgtggcgttccacgcctgcatgggcacatttaccgccgccggcattatccctgcctttttagatatctccacagaactcggcgtcggaatgcaagatgctagttacttgacctctttgcaaattgccatccttggaggtgcgcctctattctggaagccgctgtccaacaggtatgggcgccggccaatcttcctcctctctctcatctgcagtcttgtgtgtaatatcggctgtgccaagagcaccacatatgcctctctggctgcttgccgggccctcgtggcatttttcatctcgcctgcctccgccattggcagtgcggtcgtgatggagacaacattcaagaaagaccgtggccgttacatgggtgtttggacactgctggtcaccctgggtgtccccgttgggcctttcattttcggcttcgtcacctatcgcgttggttatcactggatcttctggatcctcgcaattgtaagttcacattcccacggtagtcaatactctattcatgggctgatacatctaaagatcaacggctgccagttcatcttgtatctgttccttggccctgaaactcgttatctgggcggcggcatcgacagcaaggagtcaacgatgaagatcgagtacatgtcactgcgacggatcgaccccacaccattctcatggttcgagttcatccgtccactgaccatggcccgacacccatcaatccttatcccagcgtgcgcatacgcaatggttttcctcttcggcaacattcttgcaaccgtcgagattccccaactcctgcaagagaagttcgaactcaacgccgaacagcttggcatgcagttcctaggcgcaattataggatccgtaatcggcgagcaaatgggcggcgtgctgtcagacttctggatgagccggcgcagccgacgcatcaaccgcaaggccgagccggaattccgtctgtggctcagctacttcggtttcgcgctcaccataatcggcatcatcgtcttcctggtctgcacgcaggagtcacccagcggacactggaacgtaacgcccattattggcaccgctattggtgctgtcgggaaccagctggtcaccacggtaatgatcacctatgctatcgattgcttcccacaggaagctggtaacattggtgtgttcatcacgtttgtccggcagatttggggcttccttggtcctttctggtatgttttctttctctctgcgtttattttgcaagttcgtcgctaacctcagctcaggtttgctcccatgttcgagactgtcggtatcgctcccagcgcgggaattggatctgcgctggttgtctgtgtcagtgtcattcccaccatcttcttgcaatggcggggtaagggttggcgtagcgaggagtaaaggcactgggatggaaattgacttcggtttcggtatttgacgttcacaattttcgatattattgtctcgggttgggttttgtagagtgtatcagtgggtatgatatagagtgatagagtgatcgggttcgggttcgggttagatgagtcggcatcgaacacggcaacgtggttctagattgcatataggtagctaggccaatgaatgattgtatgattcttcaaagagctttggcaatgggcgagagaaaatacacttggttagtacataacagcagcatcaaaaagacaagttgagttctgctcaagaaatcacatcgccatctgtagggatctgtagggatgtgtatagaggcataaaaattcgatatcacctggaacagcaacactcctataaagaaaggagtaaaaattaaagagaaggattttaagtcaacaatagagatctagcaaaaactcctttgagaaaaatgagccggagactatctcttaaggaccactccgggcgggaacagctcgggacaccgacccgatataattccgtagcgcgggtcaacgaggcccacgggcggccctggcagacaattgacaactgccgggtgaagagtttcttgcagccctgcttaaatgttaccagcatgcaccataaatgaaggagtgagatgttattcctatacagttctactatggggtttatgctatacaatcaaacatactagtatgatagttacatttgatcagtaaaaggccaagcatcaaatccaaggttttgcctttttctagacactttagcgagcttttgtctacaacacagttgtccgaagttatacagggcgatgtgtgggagagacttactccgggtaaggaaaaattcatttccggttgggttctgtgattggtcaaagcttcgcgatatagctgttgactcgcgtttttgcagaatcccttaccttgtggtttggagccaggatttgaatatatctatgttgtagttcgttggattggatggtcattattagtggccgcctttattgcgccgtatatagggaactttggatggttgtgcaggcaatcatcccgcatagagtttacgtgactacagcatgtatatgatttcacagttgccagagctgctcaaagtcattgactatatacaattggaaagtattgtttcagaaagtcaaatctatcgttttatattctggaatcatcattgatgctcaatcttattgataagtgtcccaatgtgaggcagcaactcaacggcaaactcgtcgccagccttgaaaaattccttcggattcctagctgctccgacaccgggcggagtgccggtcaatatgattgtgccggcaggcagggtggtgccttgggagaggaagctgattagttgagggacgctgaagatgaggtcactgcgatgaaattcaatgttagttgatgttactttgtatactagaagcaatgggaagcaaatataacgtacgtcaaggggcagttctgcattatgttgccgttcttgagaccgcgaatctgaagcttgctggcatcagggacgagagcagcggaaacgaggacggggcctatatataccaagtcagtgtaaaattctcctggatattatacagtccatgaacaaaccaatcgggcatgcgccatcaaagccctttgaaaaagaccactggctctgactcatctgagaggtgcgactagaaacatcgttcgcagctgtgtagccaagaacgtagtcgagggcctcagacttgggcacatccttagcgtcacggccaatgacaataaccatctcagactcgtagtcgcctgtgttatcttgctgtgtaatcttgggcagaactgttggtgcaggccaagggtcagccagagagctggccggcttcatgaacaatgtcgggacttcggggattgggagacccatctccctggcgtgggaagcatactatagtgcgcattagtaacttcatttctcttgaatgttcctttcatgattaaaacccacgttcaagccgatacagcgaatagttccaacctcgctttgcgccaagggggacagaatccgcgcgatggtctccgtcgcatcagtcacctggccagggctcaggactgaagtaccggagaacgggcgcaccgaaacctcctttccctggtagagagccaatccaacatccaacttaggatcgacgggctctccgattagaaccttggtggggtttgacttagggacaaagcgcaccaagcctatttgccgtcagtctggatatccgggtcaatttgagagatttcttacgcgaaaacgtagatgcgattttggacatgattgtattatttggagaatcaaaagaggatacaagtgaattgaagcagaaaccccatatataataagagctgtcgcgaccgatagcggagtatgtctaccccggcactgtataagccggaggggcagcttcccacaatgtggggaagtggcgagcgcggccgatttcagcttggagaataaaaagaacaaaatccccgcgatggtcatggttgtgtagtcattattcctatccgtatcccaccgtcatgtctgctcctaaaggtcccttccacctggttagtgtcaacaccgctccggagcgcgccagacgcctcatcggccgcgtcgccgaggctctgagcgatcggtacactatcatccacgtcgacaactgcgagagtaagcatattgagcgtcattattgagtgtgaatctcggttgacagagtctcgcgcaggaatcgacgaggtcgaggccaaggtcaagcagcacaacccggaggttctggtaagtccgaacttcgggatttccgaacattcccaagctagaatttcaaattaacgccctgaacagttcagcgcctctatgtggaccgctgaggaggctgcgcagatccaccaaattgctcggtctgttcgacccgatatcaagctgcatgccattcccgagggcttgcaggtcgagcgtggccctgatgccattgttgaatatctgcttgagaaggtgccggtgctgctggacagctaaacattgtaaatatatatgaccatgatatatccgtgtctcaataaacgttcgatgactagtatttattacgttgctctcagttaagtccacggtatggaaactttgccttccttgtgatatctccgcaggcaccatagtatgttcttccgagccgcaaagtaaccgcattaaacgcattttatgctgatgaaacagagaggacagaaagccatacaaggcttaaccttcgttttgtagattattggaactttcgatagcctggcaaatccgacttcagaaatgagtcagtcgacgagaaaataagggtcccatgactacactaactctgagtgactttaactacatgcgaaccaccgacaagcaacctctcggtgtttaaatatttcgggaaattgaaccagcaagaatatgcacagcctgatacagcattctatagtggcatctcgtacggcgcccttgaccacccttggcaatgccacacaccgagatatatctgtgcaatgatccagagctgagtggttcctgcccatcgattggctccagtctaccaaaaattcggaaaccagaagcaaccgtctctcgctgagatttgtggatccatcgagcgaaactggacgagtaatccacggaccacagcccccaagccctcaatacggcacctgctcaatacgacaattctgctcaaaaatggtccctcaatgacttcctatccaatagttattcggtgaacacgagctccatcccgctccaaccccttggcaccttggcattcagggtcagccaggtataactcccgggttatcacttcactaggcacaaaacgaatcattttcacggtcaaagcccgtgcttataagctcatgctcgaccggggcattttctagttctctgttttcttctttttgatgaaaatctagaatgatgagctgacagacgattctatctcaatattctataagctgattcacgagttcgagagcaatgttacttcgtcgccattttctcacaatcctggccttactagccgtcccaacgcgggtattatcacgaaagggcggtgatggctctagcagcgatggcgatagtggtagctccagcggctccagcggctccagtgatagcgatgacacctcttcgtcaacaccatcctcaggcggactcaactgctttgatacccaccgccttgactttgacgatcttcaaccttcgcactacgaccgatacaatcgggaaccacgccgtggtcatgctagcgcttacagcgattgggatggcgtgttcttcaaaggctcagccagtttcaaatacacaatccaaacaccacctaacaatttgacagaaggcgacatcgttagttcatctttcatcacatgccccattggcacacaatccatgcgcatgctaggcgctgcatgggtcgctgccaaagctcccactcccgctggacctctcaatcccatcacgttggggttcaaggcctggaagagcaacgtgcgcgtctcagatatcgattattcatacagtgtctgcgaagacttggatctcatgcgcctcactacgacggtggactggtacaatgaaacttcagtcgagaaggccatggatgcagttgcgttaaacgtaacacaggcggctgataacaaaaacaagatcctgttcgacggggtctatgatcttaaggactgggcagatagtgaaaggagctccatggaaccagcacgctatgacaacgccggtctttcggatcagatgatttcccttccggatagtctatgctccgagtacagcaatttgggtaaaatcctcattggatggcccactgggacacacatcaatgggtctatgaccaatgaaactcttgagttgggtttttctggctcgacaattgctgggttttcacatcggtatccatggccggacaccgacacgaaagtaaatgtgactttcgaatttacatttgcgggtagttatgatgctgcgaattcatctcaggtggttctccccggggcgtcgagccacaatgcgtcactaatcacctttgagagggcgactggtagtgccactgccacaagtctctcattgtactccgtactactgtctttattggtcagtgttggggtgatatttgtgtgagcatacaactctgggaggaaatatatcaagttatcgccaatatcaattgatattttcccttctacttccttttcgttgtcatgaagaaactcaataacaagaaaattcatttttaagtaatcctccacctttgctagcatctcaatagcccggcatcactaggacacatacctaaatattaaaccgaataagtcgcaaatggcagtaattcgtcactccatacttagtaaccatttttgtctgggacgattccatagcaaggaccattcttgctaaacatggcccgcaagtcatggacaataaattcaggaacctcccaggcagcaaagtgacctccacgaggatgctcgttctgttgaacaaccggacctaggccagtggcccaagagcaagggatgacagaaatttcacgaggaagatgtgcaattgccagcttcactcgcgggacgtatgcaatcaagtccttgtaggatgttcccttgaccacctcggcgtgaaaagcttcatagtatatgcggacactagcggcgggtccggccgtagaaaaccaatagatagatatccatgttagaatctcgtcgtcggtccaggcatatgagtctgtccagtcgtgcagcttctcgtaaatccaggctaacaaggcaacagggctgtctgctagtgctgtgccaatggtctgtggcttggtgctttggagttggttgtaaccgaagccttctcgattaaaccactcagtcctttcgcgacctgccttttctcggccattgtacggcagcaatgcgtgttgcagggctgtccatgggttattgatgaatttagggggcttagccagcaccatgtttatatgagaggctcggcagtgctcggggtatagtagaccgatggttctagtaatccagaatccccaatctcctccctgggtcactgtgcatagtggagttagttcagggctacattttagttcttttcgagccataccatactgatcatagcccagcttgatcatgagcttgtgtaagacttcggcatattgtgcaaggccaaagccacgttgagtcactcctgaagagaagccgaaattaggcagcgatggagccacaacgtggaatgcaggactgtggtcgtcgcctttcagcatcggtagtagtttcgtgacttcaatgaacgatcccggccctatttagaaattagacaccgcacgctataggaaatttatggattcgattaatgagaataccgatactcacatccatggctaaagagcagtggaatcgcgttctttttggtgttgatctggtggacatctacatgttgaaccgcgtgaatctcggacactgaggaatccgtattgcgtaaaactcacagtggatatccaaactgccaaacccatctacctcgatcgacgttcgatattggggcagttcattcaacttggcttctgccttccgccagtcaaagccatccttccaatactctatgagtcgctgcacttctttcacgggagttccaaaatcccaaggatcttgttcagcggactccagctgagttgcgaatttggtaagtgataggcgttgctggaggtcttggagattctcatcaggaatgaaaatattgtacagtctcggttgttcggccataacggattagtttggtttaattagatgataactagaagctatctggtgaggcagtgttgcgggggagactttgcgcttgagatgaagtcagtctctccgaggcccgggggcttcaccgccgggtatcccagaggccacaacgcctaacctagcggagtacggagtaccgggacaatgtttactcactagtgctctgttgctgttcgatattatgctacgtcacggtcttgaacccttaaatcaaatcatctaccatttattgaccacattaccctaataaactgacctatgaacaaccttagaaatcgtaagaaattttgcaataaataaatgtcctgagttaggagggtggacggccttggggggttggggggatgggggggnnnnnnnnnnnnnnnnnnnnnnnnnnnnnnnnnnnnnnnnnnnnnnnnnnnnnnnnnnnnnnnnnnnnnnnnnnnnnnnnnnnnnnnnnnnnnnnnnnnnnnnnnnnnnnnnnnnnnnnnnnnnnnnnnnnnnnnnnnnnnnnnnnnnnnnnnnnnnnnnnnnnnnnnnnnnnnnnnnnnnnnnnnnnnnnnnnnnnnnnnnnnnnnnnnnnnnnnnnnnnnnnnnnnnnnnnnnnnnnnnnnnnnnnnnnnnnnnnnnnnnnnnnnnnnnnnnnnnnnnnnnnnnnnnnnnnnnnnnnnnnnnnnnnnnnnnnnnnnnnnnnnnccggggccttccaacgttggggcccccgaggccatgaaagtagattagtcagcaagaagctggcccgcaggcccgggcggtatttccaaggtttccaatcattgatcgcttgatacttgccattctctcaacctgaaatcggaacatgttctctctccggactgttgcacgcggtgctccaggtatccgggctttctccacagcccggatactgcagaccaagctggcatatcaggtctttggtccggaaaaaggcgaagctgtccgggaccctatcctgtttctacacggtttatttgggtcaaaacagaacaaccggagtattagcaagtatgtttcgggaccagatatataatcaaacttccttttcttacatatcttttaggattttggcacgggatctgaaatgccagatcttcgcactggtgagtttccgctcgtccccggaaagacatgaacaaaacgtcattttagaatcctaaacaaatctgtacaggatctacgtaaccatggccattctttccatgcccacgagcagaattacggcgtcatggcggaggatgtacaggaattcatcaaacagcacaaactggacaaatgtgtcctgatcgggcattccatgtatgtgatcatactccatgtcagccgtagctcaagtgctcttcacatactaacaattggcaaaggggtgccaaagtggcaatggcggtagcattgcgcgcccccgaatacgtgtcagctttaatccccgttgacaacgcaccggtgaatgcagcactgcagagcgatttccacaaatatatccgcggcatgcagaaaatcgaagatgagaaggtgtcaacgcaatccgatgctaacaaaattctcgagcattatgagaaggtaaggggtggtcatcttttcaactagaggagaaggcgtggcaatgagcctggtacccttcggtaatttttagcatgctaacactacccagtctcttccaattcgccaattccttctcaccaacttgatacgctctgaagataacacactgaagtcccgagtgccgctatccatcatcggcggtgcattaaataatatggctgattttcctttcaaggaatccgataacctccattattatggcccgacgctctttgttcgtggcactaggtctaagtatgtttcggacgacaccgtgccggctatcaaaaagtttttccccaacgcgcagattgtggacgtcgaagcgggtcactggctcatttctgagaaaccggaagaatttcgccaaggtaattccctattgtcaataattaataatagtttatggcttacacgatgataatagcggtcgtgaagtttttgaagtcgatataattgggacggcattattggggtgggatatcggtcacgtgacttagaatttagacgcatatgtactagagaactccattgtacagtaataattcactcattggtgtgctgagtaatatcgatttgaatagaagatcgcccggctttgagcctatcgaccgtgtggcgaagacgtatctaataatgcttcctcttaaagctggattgcatagatatcgatggttcacgtgggaagtcgtaattcgagagtgacggagggggaagaacgagcccacggcgatagttgtgagaacataatatctaggagatcaggtttggacctgctcattcatcctgcttattccgctttcgcttcttgcctggtctgcttgaagaataaaacagatcttctgcctgctccgccctcttctttgccctcttcttgtcttttctgttggagcccgaagcaaaatatgacggaccagaagagctaggagccggcgaatagtcaattaccgaagagcattcggttgtgtttctttcgtcatcggagtctattacagaggagacccgtcgcttccctttcaaatgttgaacctgacggggttcggcggatttgccagaatacggcgacggatgaccggagctgggtccactgggcgtttgtgagcgctgtcgagcctgcatcgcagtgtgatttgacttcgaaccgcttggtgggcaattttcggccggacccttcccgttgacctgcactggctgatatgaacctagagcagggcccatggggactgtcttgggggttgtggtaagtcttggaataaaagcacggccgtttggttgtgattgaggagtttcctgtccatcgatgcgctcctccattggtctatcaagaatatcggaaatcttcgctccccctgcaagcgccttgaaagtatcttcagctttcctcagacgtttgatgtacatcttcacctcatccccctgctcagtgaatttctccaaagataccggaggctcccgctcttcaagggctttcaccttttcccggagtttgccgaaatcgttctcttcggttgcgttatgaccttccaactctttgagctttgtcctgagtaccccaagatccgctttctccgctgtgctccgggcttccaagtctttcatctgtttccgaagttcgttgagaacttcatcttcggttttgttccgaccttccaggctttctagcctcatcgagatattgccaagaccattttgcgtggtagcgtctctctcctcggcggcttttcttaactcggcgatcgctttttggacggattcgagtgccgagaaatgagcatcaatcttaccgatgaatggatcgatctttcttatggactgattgatgttgtcaaattgtgcagactgctcagaggccgtttgatccatgcctccgatggtgtcgtcttgggcggagatcctgttggataaatcactccattgatgaagatttctctgaaactcatcactgtgctccttgattgctttctcaatcggttcaatcttgtcggaaaggcctttaacctcttggagcaaagtcggcaaccgagtcaaggtctggagctgctcggatgacacatgtgctgcttgagaccttgctgcgcagacctgggcattttctgtatctgccttgaatcgattcgtatctgccttgaacgtctctgtatctctctggagcgcagaaattctgccgtcaatttcagtctggtaggccgtcaattgatgactgagtttatcaacagaggggtacatttgctgcatggcatgtgccatagaattgactaagtcgccagtagtaatgttggaccaccgtgtttctaatgaccgaatgcccctagagagagattcaattttactttcgcactttgttacagcccgaggaaggtcggagactggagtaaggcgggtttcaaatgcatctagtccgtttttgaggtcgttttggaggcgctgcaagctctcaggcaaactcgtcctaagttggtgaaggcccacggcgaatattttttgattggtgttcatttccttggagtttgcggtcaggtcctgcacctttctcaaaatttcatgctgtttggtttccagtgatttctggctcgactcttggtttctgcgtaaagcgctcaactcatccagacgggcgacatccacctcatgatggaggtccttaatcttgttgagaaaagttgtgtactcctgtactcttctttccagggacaccattcttgtaagcaccccgctgtggggagttggtgttgcttctgacgagggcccaccgccgttatcgatgttctgttgctgggttctgagtgaggccaggtgatcttcttgagcggttatttgcgccgtggtctcctgcctttgggtttccaggtcagtttcaatttgtgagatttgagtcgacgcgctattgttgagatcatgtcgtttattattgagcgacctgagattgctttcaatgtcacgaagcttgccctcagcgtgttcattcgcagtttttaatttgccgccaagatccgagatattggtctccagcttctggttggaatttctcaattcttcctcgacggtgtcaaccatcttctcgacggtggagatcttgtcatcaaacttcttgtcggcagccttcacttcatcctcaagttctgagattttattcgtgaattgaccattgcgtttcatttgatgggagactgagttcgcaatcctattcatgtatcccattacctcgtccaatccattcgggttctctagggaatgctgcactttgtccaggtttcttttgagttcatcgatatcttggccctggcttcgcatgtgcgtctggactctgtcgaattcggcatttcctttcattggattatcgccgctgctggttgggcctaggccttccctcatttccttgattgtggactccagattcccgaccctttcaggtatcttttcaagctgggattgaggcttgtactgcgacaacgtcgaattgaaattatcctgcgcctgattggagagtaatcgatgctgcatgatcgatttgacgtggatgtccaattcatttttggccgcgtccagctgctgctggaagagagcgatgacgctcggaaattgttgagattgttttgccctctgtaggtttttggtgatagaaactatctcattttggagtttctctttctcttcctcgcacttgttcactttgatcaatgagttgaccaaatcagagatggacaatgcaccttgacgaatgggcgcacttgggctttctattgacgtaggtcccgcggcgctgttaggaatcgagagtggagacacctgtgggagcgatttcgcaggggatttctggatgagggcgggtgttgcggggaggtttaggtgtgcctgttgagcagttgacgattgggaatcaactgattgcctaacagcaccggcaagccgaggatcttgcgccttggtcggggatgacccaggcagaagtaggcccgagagtcgcttgcggggattgaggttcggagagtcaacatccattctgctggccatattccctgcaatgaatgtattgcaaaatactcatcgtattcgcaggagaactaaagtatagtgtttcggcggtcgacttgtgagacgaagtctacacggcagtcctaaaatggaacgcttaaggtgcaatattaacgcgtccactgtatgaagacttggatgtgaggtattgttaaaaacgcccagtatattcctcctgaggtagtcaagggaactagatatgtctcatagaacgtgttataagcaccaaatttgtagaattcaagccatgccaataaaacaaagcagaaatgaggtcaagcgggttcaccattcctttcaggaattattctgccgggcggtgacaatataattcggtctgcgatctgccctctcttcttttgctttgctagagctttggcgcatttaccaacataatcttccagtttagaataaatttcactctggaaatcttcaaatatggctgtggtgagttacaattcttctgtaataacctcacggttgctgacaccaaaacagccaatctcgactgtcgcagagagcaaggagctccggggactgaacctcatcgccgcccattcgcatatcagaggccttggtgtcgatgcagacactcttcaacctcgggcatcatcccaaggccttgtgggtcaggaaaaggcccggaaggctgctgcggtgattctgcagatggtgagggaaggcaagattgccggtcgcgctgttctgatcgcaggacctcctagcaccggaaagacagcaattgcaatgggcatggcacaatctctcgggccggacgtacctttcaccatgcttgctgcttctgaaatcttctcaatggagatgtcgaagacagaagccctgacccaggcattccggaggtccatcggtgtgcgcattaaggaagagagcgaaatcattgaaggtgaagttgtggagattcaaattgaccggagtgttactggcgtgagtggattctctatgcaaacgagttcataacattggatactgactacctacagggcaataaacaaggaaagctcacgatcaagactacggacatggaaacgatttacgacatgggaaccaagatgattgattctatgacaaaggaacgagtaatggcaggagatgtaatctcgatcgacaagtcctcaggcaagatcaccaagctcggtcgctcatacgcacgctctcgagactacgacgccatgggcgccgataccaagtttgtccaatgccccgaaggcgaactccaggttcgcaaggagatcgtccacaccgtcagcctccacgagatcgacgtcattaactcgcgttcacaaggcttcctggctctcttctccggcgatacgggcgagattcggagtgaagttcgggaccagatcaataccaaggtggctgaatggaaggaagagggtaaggcagagattattcctggtgttctgttcattgacgaggttcacatgcttgatatcgagtgttactcctacatcaatcgtgcccttgaggctgagttggcccctatcgtcatcatggctagcaatcgcggccaggcacgcatccgcggaaccacctatacctctcctcacggtctaccccttgacttcctcgatcgggttgttatcgtcagcacacatatgtactctggtgacgagatccgtcaaatcctcgccatccgagcgcaggaagaagagattgatctttcgcctgatgctctcgcccttctcaccaagattggtcaggagtcaaatctgcgttatgccagcaacattattactacttcgcatctcttgagtcaaaaacgcaaggcgaaggaggtcagtgttgatgacgtccaacgcagcttccggttgttctacgaccctgctcggagtgtgaagttcgtcaatcaatatgagcagcgcttcatcggtgaccaaggtaccgttagcttcactgctgctaccaatggcgacgccatggagctttcttaattgggttacgtgttttagtactgggctattcggtgggcagttaagcgggtcgaaaaaactacactggatcttgatttttatttcgttgtcgcatcaaacgatgtatgataggactggcgcttgctgtgtttatttggcctttgagattcaattgcagtcctctgttctgggggatctgatattaatatttcattcataaatggtattttgtgtatccaaggcaatgtcgtagctgatatggggggattatattacaagaaactgacagtgccgctccactgccctacatctccaacttgacggaactcaacaccttcgccaaagtagcccgcattcttccatgagtccatcatcgcgctatcgtacggcccatgggcatcccctccatctcgagcatcagaccatcgatattcccacatggccggaccttgctcagtcattccttccgcaggagggtcgatccagtcctcacccgtgtcgttgcggtactgccgtgtgagcatttcgcgctctgtgtcatagatatctatttgaccgcggcccattaagatatcggcggcgccagtgatagaatcaattgctttcttccgagccagctcattggggttctcatccgtcatctcgacatcctcgacggcgttcttcttcttattctttttgttttgccacttgggctttcggtgaagccctttgcccagtcgggccagtgcctcgagtgtcgtttcgccgcgttcgaggtgagtgatgatcgtcttcagggcatccgctgtcaaaacgctgtcgtccattctgtctttctctttgcgctctgcatcgcgttgctcggcagcttctttggctttcttgatgtccttcttagaaacaccctccagccacgagtcgtaggccgcatcggggtctactgctttgcggacgtagttgccttggtcgtcaaatcggccctcctcttgttctgttcgcatgttgaaggcatctaggagaggtgcgtgttttttcttcccacccgcaccaagttcctcgtccaccacttcgtcaattcgtgcgcgttcctcttccccgacttcactatcactcccatcttcctcctcatcaatttcggctgcacccttgctcagatcgacatgaagtgctcctccaccttttgaagaagcgacttggccctcgatctcgtcgtctcgtaggaaacgaacggattttttcttgtttatgatctcgtcgccgtcgacttcctcttcgccgaagtcctcttgtagctcggcgaacatatcatcatcttccgcatcttccttggcttgtttgcgtatgggtttctcttctctgcgcgcagaaaacccctcgttctcgctgtcggaatcataaccctcgagattgaccgccttgcgtcttattctttggccacgtctgccaatctcatcagcgtccagtactgcgtcttcttcgggcgcatcagctgcaagagctgagggattgcgaaggtcgaagcggggcttcttgtgctctgaggaatcctcgccgtcgtcattgtagtgggtattggcgaaatcttcgcctgcgcgcttggggcgtggcaatgaactggacatggcgcttttggggcgatttcggttgaaaacaaacgagaaagatagcaaattggaagggtaaatcacctctaagagagctgatttccttgtccggggtcggaccggaaaatcatggcggagcgagctgcgtcaccgatggcgatccaaagagcggcatattgtacctcaaatcaacccgtctcacacttttctctttgtccatcttcagtctttaaaaccacattaatttgacatggtgagtcaactcagactcccccgatcttcaccttactaactaacagctttagtaccgacctggttactggtcggatgaccccatggatggaatcctaggtgccggtatggcgcgcccgggcgccacgtcccgtcgcttcgatgaatactatcgctgctacccagtggcgatgcttcctggtcctgaaagagagaatgtgaaccacggtggcaaggtcatcatgcctcccagcgcattggacaagcttacccgacttcacattacttatccgatgttattcgagcttcataatggtgcgaaagagaggatgacgcatgcaggtgtccttgagtttattgctgaagagggaaaaatatatttgccattctgggtgagtaagacagactcgtcaacgtgttgtaactgtactaagactcggttcgctacagctgatgcaaacattactactggaacctggcgatcttcttcaaatcaaatcgacagacctccctcctggccagttcatcaaactccaagcacagtcgacctccttcctcgatattagtgacccgaaagctgtgctagaaaacgcctttcggaatttctcatgcctttccaaaggcgacgtcttcactttttcatacaatgatcaagtatatgagatggcagtgctggagacaaaaccttctgggactaagaatgctgtgtccgttctagagaccgacttggaggttgatttcgccgctccggttggattcgaagaaccacagcgaactagcgggaccagcacacccggtagcgtcattagcggtgggaagcttccagctggtggacttttacacccccatggcaccatggcacaatcaatcaactactccgccattgcccccgaggccacctctgctgccacaggtgcccgtgcggcatcatccaactttttgtctggaggacagcgcctgaacgctaaaaagggcagcaaggctccgacccctaacccttctactcctactccaggtgcttcaagttcctcacatccgcttccaacccgaagaatcaacggcccgcaaccacttcgactcccgcccaatcaactcttcttcgggtatgcaatcaaacccgtcaaaccccgtgatgagaatggtttggttgtcccagatgaccagcctaagttccaaggaattggaaaaactttgcgtgggaagcgaaaggatctgtccgactctgccaccccctcggggagtgaaactgagggccaaaagagcaaggaaaacactaaaaagtccgacggtgggggtcgaactttgggaaagcactaatgtctgcaacaacctatttaaacctacactttcacgattcccctgggcttttagatagtggaagtctctagattccgcagcgagatttccttcaagggcatagcaaggttcaacatggcgttgggggagtttttttaccttcacttgaatacacaaaaggccttgcaataaaccccactattttcatatttctcgtaggcagtccccttctccgctttctggtctttgttttacaatcagtggtattcatatgtagcggatatcgaggactcttacaacactcaagggttgggatgcttcggaacgatcaagcatgcctcctatatatctctgcatgtgaattgaactgcaggtaagttatggtcctggtcagaaacggcacgtttagttcggctagcgcgcatagctcttggcaagccgaggatcgccgtgcacaggcctgaaactggaccacactattgatctcacaccagatattgggggttgcatcatggccacaatacctgaaaccaatttgggggcattcatcagactagccccgtcagtctatctccaagacccgcccaacccgagcgagaaggcggataggccagtgatattcattgctttttggatgaatgcacccccgcgcgctttagcaaagtatgtggtcgagtacagagggctagtaccatcagcgcgaattatcttcgtcagaagctcatcaagtgacttcatctggcgtctaagggcccagacccggagagcccgcgtcaccccagccgtggaagcaatgcgcggtctagtgacacctgagaatccagtatttgtgcacttgttctcaaatgggggcatgtcgagcacaacacacctattgcaagcctggaagaatgcgacagggaccccattgcccatatcggcaatgatccttgatagcgcaccgggcagtccgagcctacgagcaggactcaaggctttctcctttgcgcttccgcagatgtggatcttgcgactgcttggaaaaggctttatttttgctttcttgattctcttcaagttgatccattcgttttctatgtttccggatcctatatcccttgcccgggagctcatcaatgatacctctttggtacgagcggctaactcggacggaactctcagtcgttgctatatatactcagatacggatgatttagtggattggcgcgatgtggaatcccatgcggtaaatgccgaggctgagggttgggtggtgcgccgtgaagtgttcaagaactcccctcatgttggacatatgagaactgagcctgatcggtattggggcattgttcgagagtacttgggagctttggtgtcggtgtgatgagcattcctttgcctttcggttttgctttggcttaaggaagactggaacgttacatgatagacacggtactgtgcgacaaatatacacatctgcttgcctccatgcataactgttttttttttctccttcaccaagtcttctgccaatgaatatatatccagggatttccttccaaacctttgaatgtcaattgacttctgatttaaccatgcagcaaagtttcgcaattccatggtcattggggttaaatcactatgactgatatctaaacatcatccaggcagatttgttagagccaacgtgctgaaaggcccggagccaatttccgcaacttccgtctcaaggacaccaaccattgcaatataccccagaatcaaagacgacgacagccatgcatcattatttcggccctcgttccactgctcccggcttgatctgttcaagtattttcccatctcaatcatcttatttcacttatcttggtgcttgtctgatattgtgcaggccatttcacaatagacctcgttaaactgggttttggtttccttcgttggccctgtcttactctgaccgagcaaaataggtcatctcattatcatatcaatcttggagacttttatttggtatattattattgactaaacgccacgatgttccaacaccaatcccaccagccgagctacctcaacaccatggcggagaaagacacccgtttcgctcttccgggattcaacaggccgctagactttgctccgacggagaaaaacatctatggtatcgagagtcggagtatgtttccatctgcgctggatgatagagatatccaagcaggatacgtggagtaagtgtagaatccccaagacccgagaggggctcaatgctgaaacccatcatcatagcctacccgtcttgacccttcgcgagatgcatatggtagagttcatggagcaactgaccgatattcatgagtggtggaaaaaggttagtcgttctcaatacaaccgatactgatgatttcgctgaaatggttttagatctttgatcccgccacacaagaggagtggaagaaggcggccttaaacagtggcaaagaccttacgctcaacatggttgaatggattattgacgagcttcaattcaaagccatgatctacgagaccacagatgtagtcgccctttacaacggcgatgtcaccaagtccgacacaaatctgcctgattcactctatagtgaaatgcaatcccagttcgaggtcctagagtacgatttggaagaaatgaagtactaccatccaggacatctaagccaacagcgtgacctcatttccatggcattgtatccgctcatttacggcagctcccgtattcttaccgacagggttattggggtcgaggactgcctcaagtttgccggcaagggtgaagtgatcccaatcccaaaagataccggaataaccagagaagacattgcctggcgcgtcttggcccgggcagacatcaaggttcggccctacagccggaaataccagcttctcccttcagactggtcactcggtgatgatggacaatggcacatagccacatacatcaacaatctgcatccaatcaaacaccggggtctctacaatctcttcgagcggattttcaattgtctcgttccgcagtggaacgcaactttgactccccttaaggacatgctccattcccgtgcccgaatggagtaccacaaggcggaatattacccagttccagcggaaatagctgcccaggcacctacgattcaaccaaaagaggcgcagagtgagtttgacgagcgcatggagaagtggagaatgcagaactgccgtgccatccaacccgacgcaggcaagttcattccctgggcagtcccaccctggttgatggacaaattgcccgaggacctgcccagtcccgttcggattgaacgcggtgtcgatatcaaccgggactacaaggaccatggactgcaggtgatcacacgtgtgttgggcattgatctaactccggagaatccgactttcaagacagactggcacgtcgagggctcgatggtgagttcaaaagcttcgataaccaaacagtgcttgataataacacaacgataaaccagaacgagcacatctgcgccgcagcattcgtaccatacgagcacgacaacataaaggacccgtccatgcaattccgcaacatggcagagtccgacacgctcacagaaatcgagcacgagccaaacgactttatctggctgaaacaagtctacggtttggaaaacggcgagccggccatccaatacccaggctcgatctgcgccaacgtaggtcgagtggtcatgtacccgagcaatgtagaacacagattcacgaacttcgagttgaaggacaagactaagcccgggcggacgcgcgccgtggtgtttttccttgtcgatcctaatatgcgtatcatctccacggccaatatcccgccgcagcgtgtggattggactaaggaatttccggctggggcagatgtcaaggaaggtttgaaagatctggcgctggataatagaaaaaacaagggagatatgcctatgaatctggacgaggctttggaaacgagagtcaacgtgttggacgagctcgagcagtttactcgctatcagcatgtggcttttgagtcaaatgttctgatgctctaatgttttattttcttcttttcctctggtttttttttctttttataataaaatttgattttttcgagggccactgccgagttgtttctgtcgctcgaaggtgatgtggtagctgcagctacgtgctactcaaaagaataattaggtaaagatgatattaaatcgccgcgctatgccattcattcgtaagaccaagtatgcacatgtcccattttgattatcccaaactccaatcaacccaaagctatatccagagctcaacgtcccttcatctcagggaactcatcatcaagcttcagacgagccgtaacgttcatactcataagttcttgaatgagaagtttggcagcatatgggatgaccatcttcacaacggaacgagacgacttgcacccaggacaccagttcaagtagcccatgaaaccacacttttcacagacatccacctcgtggcgatcggacgagatcatgaggcgctccagcagcagctgactagtaccgtacgcaatcaaacaatcacgttccatctcaccgagacgcaaacctccattacgcgaacgaccctcggtaggctggcgagtgagagtagcagtggggcccttggcacgtgcgtgcatcttgtcttgaaccatgtgcttcagtttctggtaatagatgggaccggtgaagacgtagaaaggcagagcctcaccggtgataccggaagtgaggtagtccttgccaccatagctaaagcctttgtcgatcagaatttgggacatttcttcgacgggactgccgccgaaacaggtaccgtagccgtgttggccggacaaaacacctgctttaccggcgacaagctccagcatctttccgactgtcattcgagaggggaaaccgtgagggttcatgataatgtcagggttgatgccttggtccgaaaatggcatgtccgcctggtctgcaataattccaacaacacccttctgtccgtggcgggaagagaacttgtcgccgacctcagggcgacgggtttgtcgggtcaggaccttgatgagttgcgtctcgccttcagtggcagataacatgaccttgtctatgtaggaaggatctggcagcttgtagttcatgggtgcctcgataacatctccgccgccaatgtcggagccggggaatcccaacgaattttgtaccctaggcgtgaccttatttatatagctttcgccgttattgaccatttcgccaactgcagccagaccatcagactcgagaagcgcgtgcttgcggattggaacaccattctcgtatgtcggtcctttgagggaatccttggctccgttggggtaactcttcagcgtcgtgacgtacttgcggaagacctggcaacgtccaaagccacggtccactgatcccttgttcaagaccagagcatcctcaatatcgtagccagaataactcatcacggcaacagtcgcattctgccccgcaggtagttggtcgtattttgtcagctcaatggttcgtgatttaaccatgggcttttgtgggtagaccatgaggtaaagaatggaatcaattcgctggaattgattggaagcaatagcgccaatggcttgcttacccatggcacattggtaggtattacgtggggactggttgtggtgaggataagggatcaagccggcaacagctccaaggactgtgaagggttcaatctcaagatgggtgtgagtatttgagatgtccttctcgtagatggcgatgtaggagtcgttctcctcgttcacgtcgaggtattcaacgagcccttgcgcgaggaagtcgtcgaactccatttctccatctcgcagcttctcgagatgctgaacactgacaagagatttgccattctccacaacaatgagaggtctgcaaatacgtccatcatcagtggcgacatggacggctcgctgatggtgattgatgtaaatgctgacaaattccgaaacccggcccatgcggcgcagtcttcggaaagcattgaggaaggacttggggcgtctggtcagaccagtcggtgtaccgttgatagaaattgtgtaagcaccccgagcatagagctgctgtccaccaacactcgatatgtcttcgacgccgagcatgaatatcaagtttcgcaccggtccttcttcatcgttggttgtgatatgcgtcatgagggccaagttcttgaccaaaccacatgcctcaccttcgggggtatctgcagggcacaacattccgaactgggacggttgcaaggcacgaggaccactgaccttacgggtcttttcgaactgactgctaatacgggtcatcataccgagagctgcaatgtaactcaatcggctgagaacgtgagtgacaccggcacgctccatgcggaaacgcttcaagctccagtttcctgtggagatggctcggttcataccctgagtaatatgatttccatgcatagtcacgatagtccaggcatcgaactgctcggcccgattgcgtttgttcaggactttgtcgatgttcatcttgatatcgaaacaaaatttcttgaacaaatcttcaaaaagaagggccaacatctgacccgccagctccagtcgtttgtttccaagataatcacggtcatccactagggctgggtcactctttgccatcagaacgcgacgagccatgtgagcaacgtagatagccttgggtcggaagttcatgtctttgacctcaatatgagaaataataacagatgcaatggcctcaactgcctcttgaacgtgagtcttgcgataagcggcttgtttgcggttgatcttgatgcgacatccgatccactcgagggcttgttgctgagtgtaaacatcgacgttgattgcctcttcgaaatttatagcaaaatcatcttgatacagactatcgtcaccagtaaccatttgcatcatttccttgtcggtgtggatgcccatggccttgagcaaaatgacgattgggatgtcttcattgagtacgttgtgcttgacgtagagtctgccttttttcgagacgatgtaactcttagacttacgctcgtttgaggaactgtggatgttagggatagcaaattaagaaaggtccaacatgggacatacctggtaaccgaggcctggacgatatctttttttgggtcggtttccacaataattctgtttttactcaattgttcttgtacaagaatgaccttttctgttccgttcacgacgaagtaaccaccggggtcaagaggacattcattgaggacgcttatttgagcaggcgttttattcgacagcacacatttagaactgcggagcatgatcggaattcttccgatggggactgctcgtcggataaccctttgccggccacggacatactcaaagtcaacgagaatgggtgcagcgtatgtagtgtctcgtagcctacactcttgcggcgtgatcgtggactcgaaatcaattccaccatcgccttgctcgtcggctcgtcgaggggaggcaacgtagatatcagtaaacttgatgtagaagttgtggtccacatcacttcgaatcgtggagcttgactcgacaattttcttcatttgcacctccacgaagtagttgtaggagtcaaggtgctgcttcaccagccctttgaccttgaggaatgccggtagcaggttccatttgtccctggccgtatcgatagggtctgtgagccctttattgtagtaaaacggttccaaaagtgcatcgaatggatctctagccttgaaatccgaagctggttcaacctttccgggcacgggatgttggtgaggctcaggaacagggttggacacggacggacgcttgcttttcgtagagtcagtcgccgagtggcttccggcctggtcaagtagcaggggagtcagtatagccatcagaagttgcgacggaaaaaaagttttgttacctctgaaggacgtcgcggtcgactggccgcagagggctgtggcctcttgcgcgggggcattttggctagacagctgaggtttagagaaagcgatcaagaaatatatcccaatcaaaccactcagttgtccaaaaagaagctcgcaagatggattctcatggaggggaaagatttgagtaatttggagatggcttaataagccgcgggctggagctgatagttgcctgaggcattgacgataagaggatcatttatgtcttttcggggtttcatatattggctagctagaaggatacgtacatgatagctatagaagtgtcatatgagtgggaataataacatgaagtaggcttgccgggcttatcactcggcgacgggacaacataccttaaccttatagatgactttttgatgtgtaaccagggatagccattgaagattccggacatgcctgttaatttgactggaatgagatttgaagctctcttgttcccatttgatgactatttgggaaggatgtagctgcaatagtggaaacttttgtatagtaacgaggcagaaattcgtgatctctaatatatatcttgagacgaccttggtacggagtagatcattccagaatgaaaactgaaaatggggattgggcaaacgaaaagggcattcccgagtactttatccgttattgaaaacttaatctatctgaatctgtagttagatccatcttatcaagtaacggtacaaaatcgaaggcccggagcataccagcgttaactccgaggcagtcttggagaagcggatcttgggctatccactaaacgtgaaccgatttgaagaatgattcatgttagtatcaactactcaaatgtatagagctgtccagggctagatttacgagagccaggttgtcaaaggtttgtccattgacatggtatgtagtacatgtgggtcttttgcgcatgcaggccaccccccggacatttacgcctgcacggacacggacaaatgatcagaattgactcggttctgctcgagagagacgatctacagcagtgcatggtatagataacaacaccagatagtaaataagcggtcacgtagaagacaacgtggaaaaaaggcttccaccgcatataccaagcgctaggcattccgttcacaggatacggagtactgagattattattagtgcccatagttgcactgcttttgtggcatatgatttatcaagtactgggaacattcggtccttcatgtgcgatgtattattattttttgatgcctgtggcgaaatcagtttgaccgcaacttcgaaattgccacccttcgcttcacgggcacaagattgtacgcaatcttgccttttccggagggaattcccatatttctaatccagtgcacgaagctacagcgcaatgagtggtccaatgtatctgtcatagtacttgaagatggtattgatcgctgtagcaaaaggaaggtataaatatgtatatgcaacgccatccacacgtggttggtcagacaggggtcatcgccatccgatatgttctatgtactccgtactccatacagtatcctccgaggagataatcccgacgaaagcattagcaatgttatcgaccggggtatatccgttatcgacagcctagaaggcctattgtagggctttttcctgcaggggttggttggacagagggggcggagaccattttctggctagggagtttcagatattatttgcacaggtacttttggaagcagaatcatagtgacttctaccaagactattttacgaatgatttcgaattgtgattcgtgatatcaaaaccgaggcagccagtcaatttagggggggtgactcaggcgtcgggcatgaaagaaagtaattaaaattggtgcaattttgggcgtcaataagtgggtttcgaggctcaagcctgcgattagtgggtattacgagtgcaatcatggtgactattggatgctaggagaccaggaccatatctataagtaagtactccgtactccgtacggagtagttcgcgcacagttggggagttcggtgtaccgaggttttactccgtatcacttggacagcacagaccgtagcgagtactcagctcagatcgaaaaccataataatccatcgggattcttaacagatagtacatacatcgatagatagaggggaaaaagtggtccatgtttggcgatctctccgatgtgtgaataaataataaagatgactggggtttggagcatccccgctccatcggtatgcttgttatttggtggatcaggggcttcaagcgacgcgggatcagcgctgggtggcacttacaccgcttgtcctgacgtttagggaagcctgtgaagagtgtgatatgggggaagtttaaaaacagatttcgatgtgttcgagaaattccagaagtataaaagaaccttggattggctgaaaaggaaaaggaaaaaaggagccattggcacagacccgtggaacgagaacaaagaaaaaagaattaacccatggacgaggagctaaccgtttttccatggagcccctattttttctttcttccattctgatattggcatatactaccccaacataactataccggtaatccctatctcttccaatacttcatacaacctacccaggattcaggtacggatcaggtacggagtataggcgcctaatcattctagatggcgatctgttatcacatcttcgggcacttgggtcccatcagttctccacaagtattcaagaggggccaaatgcacctgcagctgccacgctctaccagcgcattccaccttcccctcctcacggtatcctagcacagtggttctcccgtgtatagcccaggctgtccccggtccaccatgaaattgaccattcgtagcctcttcaggcctcgcgggggctatagcccattgactaccccaggctcttcccgggacaaaagcgcccaggtcgtacagacaacagaggctctccaatcaatggaacccgatcaattcccgagtaagtgctggccgatcatctgctgtggtcaagttgtggtcggcaacatactatagttgaagtatacacaacgtgtatggatttgcaacgaacccatattatataacctcgagaatacactacgtaaataatgcaagatcaaaagattcaaaaggtcactgccaaacttctgactaaaacaaaaaagaaaaaaagaagcagaaacaaatcgaaagaaaagaaagaaaaaaaaaaaaagaaaactagagcacagtcatctcctaaaaggatatccccgctctgatctggactcccagccattttctccccctcttcctcttcttctcttttcctcccttaccaaatcccttttgtacaacagttttgtatctttcgtttgggtcattgttaggttgtatttcctcacgcgacacgctcgtttcgcccgcgcctcgatccctcggtgttcgctaaatcggagcggtaagaggagctttatcccaccctgcaactccctgctgatctccgcaccgtcaggtacacacgatattcccgctcgacattgcccatagatgacttgcgcagcttcaaatcgcatagcaattctcccatcaaccggatttgactcctctcgaggcgttcattgtgtgagttaggccctttttgcgagcgcagatcttctccgcctggtcaacccctcagcccctctctcgacttccccttgcttgagacgccgacgacacacacaccgccagcccacccttccctaccattcggatatttccccggcctccggagcacgtcgcgtcacaatatctggggctgggagtaattgcttccccggagaagctccctaaaaacaccgtttttcggcgtcaacaaattcctatatttgctgaccggtgcttgtatagttgaacaattcggcctgtccacgatggccttcaagcacgggctgagtgaacgcctcgacgagctgcgcttcccatccccacgatccccaccctcggaggctgcgttccctgggtacacttctctttccccgggtcattcaaactttggatcgggattctcgtctcgcccagctagtgatgttcgagcgaacctgcagcgtcggtttacgactgattcgagcaagttgtcgtcatggaattatttgaatccaagctcgggatctggctcgagctctggctctggttcgggccagatgcaagatcctgtggatttattgtcttcggtaagattgaaatttctttttgagttagccattatccctatgcattgaactttcgtatcgatctcgtttccattgaatggttggcgatgagtggggttatgtgaattggtgtgctggttgttcagcctctgtatgattctttgagatcaagttctgtcggcgtctggcatgtcacactaccttgcagcttgaagttgacgagaattcactgccattcatccccgcgattcatccctaccattcattccccgcgattcatctgctgctattcatcatccttatctcttatctctttcactcaattgcccattgtttcctattcatcagtttcctttatgcgtcaggcaaactcgccgaggtgattgatacgattgatgcgattgtcgcttattgatggttcaactccgtccattctgagcctattcatacttcaaatcgagtcttgctgctaggctgcgatccggtcaggattggtataagaactacagcttcacactttcccttttgcttcttcttttacttcacttcataactttcgcatctgttccatatcttcgactccgagaacgctcactgcctgtgctactttatttgccgttgatttcgcgtcacattcacattactttttctgattacgtcgtgcgttcggttggtattcctcttgcttgttctgtgtgtctacggagatatctttctatgccctttcaagtgtcttctacgttttttgtgcaattctgacaagttttgggcttccacttttctctcacttcgttcaaactgatatctttctcaaacttccttccctcttcctcgttcttttgcttgaatacatcattctggaaaccatatctgacttcttcaacagttcgagaaaaaaagacagcacattgagtacatgcgtgaacagaaacgccgtttcgaagaggatatgaaaatcctcgaccttcagcacgctcgcgagaaactggagatggaccagctcgctcgggacttggcacaggctggcatctctggtccagtcagtgagccaaccaccccgcctgagtaccgtgatactactgtgtcgagcgcctttagccgccctgctcgtttctccacctcgagcgtgacctcttcacccggatttttcaatgcttttgctgcttcaaccttgacttcccccccgcctacttcccaacctgctcagccgtcgattgaccgatttgccggacactctgtgcccggttcgcgccgaaactccgagaaggacgacttccttgccgatcctacttctcccttccgatcaggcccatcgtgagtggaaaccccatctttcgtgttgtggtatccagggcttagctaataattatttagcgctgttcaccgatactcgctgccctccggcaatccaaatggccagtctcatcgctccagcatctccggtttgaatggatcacgccttgacaccttcaacgttcccaaataccttttccccagtgaggaggacaagcctcaaagccatctgagggagctcgaacgcttgtcgactcctgacatcaagagttacatcaagttgaccgaacctgatgacaagttcccaaccctgtcccgtcgtggtgactcaaacatggtaagtttcttataattgaacacaaaacatcccgaatcctaatcatttacttagttgtcggcaaaccctgatgcccatgatctcgccaaccctcgttctccaggctcggagcattattccaaccacagtcggcaccggtcgtctcaccagagcatgccgcagaatattcacaactttgggcgcctggaacagctgggaagccaccataacgaggatcacggcagctttgtccaaaccccacgccacagtgcacgtcgttccatgggaagccagatgaccttccacgataaccgccatgatgagatagcaacccctgttgcctcgagccgtccaaatgctctgcagtcatcatactcaactaatgatctgcctactatcaagggaaatggagctggcaaagcagttactcccccgaagactcacattgagcacatgcatcaccacaataccagtatggggcgcattccccagagtggtgtgaacaaccaggtcaaagccgagttcgatgagaccgacttctatggtaatcaatcgaatttgcacgcgagcgcccctcccttcgggcctcagatcaatacggctccatctacccaccacgttcctagttcggttgctcaaatgggattgccattccaagtgcctgcggttcctgccttcaattatggaatgcagggctatgtcggccaagcaaccccgatcaacggtcatatgcaaaacttcggaggagcttccgcctacaacaatgcctaccccaactatggtcctgggttccgctttaatgaacctgcagcccgaggcaccatggctcagcgtcgccaagagaatgatgcgacccagctcactcgtttcggcaattaccccttggagcattacaagggtgagttgtacagcctgtgcaaggaccagcatggttgccgatacttgcagcgcaagttggaggagcgtaacccggagcacgtggagctgattttcagtgagacttacatgcatgtcattgagctcatgaccggtatgaaacatttaccccttgcaccctaacccattgtcattactaaccttcatcctcgaacagatccatttggcaattatctttgccagaaattgctggaatactccaacgatgaacaacgcactgctttgattgacaatgctgcccctgagttggttaagattgccctgaatcagcatggtactcgtgcactgcagaagatgattgaatttatctcgaccccgcagcagactcagacagttatcaatgcattgcagtatcatgtcgttgatctggtgcaggatctgaatggtaaccacgttattcagaaatgcctcaaccgcctcactcccgaggatgccgagttcatttacgaagctgtcggaggcaattgtgtagttgtcggtactcatcgccatggatgttgtgttcttcagcgttgcattgaccatgcttcggggcatcaaaaggctcgtctgatttcgcagattacctcacactcgttcgctttggtccaggatcctttcggaaattatgttgtgcaatacattctggatcttgcggagcctagcttcaccaacccgttgtgtgctaccttcggaggcaacattcctcagctgtcaaagcaaaagtttagctccaatgtgattgagaaatgcctccggactgctgataactacatgaagcgcgagatgattgatgaattcttaatgggcaatgagctcgagaagatgctgcgtgattcatttgcgaactatgttgtccagactgccatggacttctgtgacctcgacacccgcaaccgcattgtggaggctgttcgtcctattcttccatctatccgtcaaactcctcatggtcggcgtattgctggcaagattatggccgcggataccaacagccgcagcaatggtagcagtgctactaccagcggccaggtcacccccaatgagttgagcagcagcgcacagatccccaaggccttgctgcagaagcccttcgcataccaccaaggtggtacccagagtactcagtcttcgagctcatccggcggatacagcaaccagccctacgtacctcaatcctcccagagctctgtctctaacactccttctggacaaagtgacacctcgtctgtttacactgcgcccactcctcagctgtccgcaaaggctggatcgcagcaagtccagaactacttctgattgggtctgggatacccacatcagtgcttgtctttcacacccccagtgtactcatagtgagacgatgcgacgaaacatttcttttttttctcttcacgattttacggttactttttacactgtcatcgaactgggcctacatcaactgcacatgccatgatcatttatcccatgatttaccacacttgcgttttactgcatacaccttcgaagcaatgtgccatgatcattgcatttggccatgttgcatactgcattttcatgaagcgacccgtgcatgatgcagagctcgttggaactatgttcctctgctccctgtgtttcgcaacatcttgtatttcttgttttccattcccccctttattttcccagttgcctttcatacctaggtcttgaggatatctggcaatagttggatcgttcatcggaacaatctggtactccattgccttaatttgaggactggttcgtttggcttgggttgtctttcttcttttttttcctttttcgcttccacattgtgattttcaactcttatttttttacccattcatcgttgtacttttgcgctttgctcttttcgaactgcgttttgtgtcgtgcccatccttcacattggttcattgtcgcatacaagctgagccgagcatggatattacaatgagtatggagcctttgttcattgatgaccttggttgttttccggccagcttattgcttcctcagattgatgatactgccatttggtactcggaccagatattcgtcatgcatgatcctgcacacagtttttgcatgtattttagcaatggaaagctgaattaagttttcatacaattttctcaatatccaactctagtagatttctatttctttgtcttcgtagttcattaagtttccgaggttgtcaactctgcagcgcgacgcgtgatcacgtgcgtaccaaccgagctgcacttcggagctttagcaggataccacaccttgcttttgacaccaagtcagcctacaaggtccaaaccatttactgggcctctcatgctaccaaaagaggttgccagctcattgagcacacaatggccatgtcgcaatgtccagatgcggcagctagccagtctgttgaatgtgagtttactatgcattccttccattcgccaatcaccctcggagaaagtgactgaccctcaatatttgaatagcctcacgttcctagccctccaaccttggttgtccatggtatttctgcgacctgcaaatcgactatcctccgggccgtccttgctaccctcgaagtgccacacgccattgtcagaagttcggaatgtattacgggacggcatctcctgacgaaaatactatggaatacactggaggcactgggccagaaggaagaatgggagacctccggcaaaggaagatgcgagcacgtcagtggccttgcagtcttacttgaggagtgcctggcagcgaggcccgttcaaacgctaggcaaattcgtgctggtgctggatgagattgacaggcaaagagaggcaccgcatactttgctctcggcgctggcgcggctaggcgatatcgtgagtcgccgctttggacgacttttgcaagtgtaaaatgttgctaacccgataatttgtagattccatctctttgtgttgttctggtcctcagctcgaccccacggccattattcctccaaagtgcggctgttccgcacgtcagcttccctccctatacccgcaaggaggctatccacattattctcagttcggacgcgccggtcgtggatgggttgcccgatgaaacctcctcgcgggtatacccgtactttgtatctacagtctacgactcattggtgggaccaacagcaggctctataccggatttccggtccatatgtgaaagattgtggcctcggtttgttgcgcctgtagtgaatggcgaaacacccccgggcgggaacagtgagtgggatttctcgcggttgcttgtcaaaaacagagtcatctttcgacatcagggcgagtctgcgctggtgcaccacattgttcccgatgagactcctgctggcgagaaacggaccacgctggcaaaaaccgctatgccttcggccctcccttctctgccatatttctcgaccttgatcctcacatccgcatatctggcctcgcacacgcctcaacgactagatacaatcttcttctctaaattctcctcttcatccctttcagcccggaacaagcgtgcccaccaccgtcgacgtttgaaagtcctctcccaagcccaggccgaagagagacaagccgcaaacgatgacccttcaacccccaacaagaaaggaaagcgaactaaaactcgcattacaaaatcaacactatcatccgcctttgcgacctcctcggccaccacatcagctgtcggcggtggcgcaggcatcgccggcccgtccaccatccttacagcccgttctttccccctagaacgtctcctggccatctaccatgcgatcgacccaaaccccccagcaacaccacttcgagtttcagccgttgcagaccgtatctacgccgaactggcaaccctgcgacgcctgcggctcgttgtccccgctgctagccacaatgccatggcgactagtagtgggaataccactgccgatgcgggagataagtggtgtgtcaacgtctctggcgactgggtcggtgagctggctaagggtattggtgtcgaggttggtgagtggttggctggcggtctggactgattcgttttttctttgagatgaaggagttggtctttgtactggtgctttgttcttgcatttatcaacgggagttcttggcttgttggccctgcattgcatactggttttaattatggttaggtcaattatacccatgtcatcgttctacttgatcattgcctatccgtatgccagtaaaatgcttgcttatctcttagttgtggagttgcgtgttgctgcaaggccatgttcatcgagttctccctcgaatggctaattcctacggtgtgcgcaggggtatagattcggaagatatcttggagattcgacgtcgctaatcctccagtgtacctaacaatctatgctcgcatgcaaaaattaatcatcatacagcacaaatccaatacctgcattcgaactccaacaaggaataacaaagtagctgaaaacccaatcgccaagaaacgccaaagactatgcgtaaggtaagatccttatagcagagaagatggatgaacaaaaaaaaatccaacgccataccacctaccaagtccactgctcaaccacatcatcagtgccaaccaacaaactcggtccatgcgggccccgccactccggggtatcattcccatactcgaatcgcacacagctaggtggtgaggaatattgatgccctgtgagaggcgatgagacctgcagtccggtttggagagagaatagctggattttgcagtcctgggatgctaaagtgaaatgtatgttagcattagacgaactaaaatcgggatattctgatttttgaggggagcatacgactagccagaagaccgagctcggtgctcagatcgaaggttgggaacggtagtgaagagaattcggggaaagttaggtagggctttgaggaatcatgacgttcaagcatttttggcgcgaagcggaggtcgtacattcgtagctgaggtgaatgtcagttaaaaccagcccggacgtcgtatcggatagaaaagagaagaagaaggcgtagacagcgtcacataccgagctaggtcccgccgccacgagccggtactcgtccatctgcttcatttccatcacagcatcgttgtgtcggagacgtgtggcactgccaccactgcgcatgtcgtggaggaagatgttagagtttttctgtcccgccgcaatcacgtcctgcgacatccattccacggcatgcacgctgcgttggctgctgtgcttggggggtgctctggtgcgtgtgggaagtatattgcccttaaatggtttcttcgagagggtccaatggctactggtaccctctagggtgtgtagcccttctgaagttcctatggcaaagtaggcgcttgatcctgcgggctgggccgcggagcaccagaaggacatcgggtagtggggtctgatccgaatcgggtgagagactggaaggtcttgggtaagcacggtgtctagggatagagatacatataaagtcgtacatgttggccagcggtagttgccgccttcgtcgggctctgggaggagatgggccgaaaggaagcagtcaccttgcggtccttcgttcattgttgcactagagttgttagcagtgagtatatctaacagccttgtatggagacgtacagtaggtatcctgagtggctcaaagacatcgatcctaactagaatggggtgttaatgtgccttcaatggaacgaagtgctgggatcgaatgtgctcaccgaatacggctccctgaatagcacccgttccatggtgtgatcatagctccactgtgactcgtcaatgtcaggaaaacagaccctactcgctggttagtggtaattgacattcgccagcgctcatcaacttacgacacagacgattcatatccgcgagccgagccttgtcgcgcgtgttagtcacgtttcgagatcataaaagccagtgaaactcaccggcaatcaatgtcccagaacgtgggttgcgcaagacatatcggatactgtacgagctaggccatggctcgaaacgatggagttctccacgatgtagttggctggcctgaatgcgagcctgctgttcttgtctcgcacgggaggaagattcaatggctccaatctctctttggaggttgaccaagggatgtctcaacgatggcgcttttcggatcatctctttattctcacgttgtctgaaccgtgttttgttttcatgtgtctgcgattgattagcgaatctgatgaaatacatagatccctgctactgaccgctagctcagaccgctttcgcttcacggattgctgcgagtattgtgcatttgggggtgcaacatggttggcttgaatcttgaagtacttcttcttctccgggtctgtgatactcggtcagtgtgtgtagaagggtagttgatcactgcgtgtataaaacagtggcatggctagacagttcgatacagcccgtatgtgtcgctggaagtcaacagcccgcgcctttacgtactgtcctcgcgcacctcggcagaaggaaagaagcgcagcaaaacgcgacgtaccataatagaaaccagggatttcacgagtcatagttgctgataatgtgcgatgtcgagaaggtagatatcagggaatgcacgaagagggaaagtgacccagctatgttcaagttatcaagatagtcatgagccttccactttcgagtgtctagcacaaacgaacaaccatagtggattcgaccccaacaaagctaagcatgaatataaacaaacacaagtctatctgattaaccatatgagatgtggaagatcttgaatcgatttacatgaacaggcagttatatcagacttgaatttgaagacccgtgagtgacgtgagattatgtaatacatcatatttgtgcctcaggccgcagttctgatagctgccctaaacggcagtacacttgaactgaactgaaacatcttttgttcttgtttttgtatttgcttctgcttttgttgtgctttcattttgaatttgccctaatttatctaacaagattcacattgattaactccaagttctgatttcccacatttaatacacatatgccaatcaattgaatggtcgcgctttccaattgaatcggatattgcgaagagtcaatacattcaccacccgaattgcactcaataccattgactgaatgtcaactgagagcaacacagtataattgaatatttgaagacaccttgttatttttgcttatctttgtcccggtgaggcttgacaggcaaggcgaagttggtaatgactcccaaagtttcaccagccgaacaattgatgtcatcgtgaatataatttctgtcacttcttggacagattcctttccaggaccagggtgccgcatgattcattgtcacgccgtagcctgccactcattgtcaggttccgataagccagtataccttcttcaagcgtatggccggtcagtatcctgaatcccattgccgtagtttcgaagaatttctatagatagaatgaagaggcaatttctgacagtatttgctcattctccataggccgataatgacgctgcatgtcggaaaaagccctggcaggcggaggcaggcgtttgtaatgggccatgtgtcctcgatagtagttggcgcctagtcatcaagggtcgttccttcgatataaaacccacgatgccgaggctcggcgtttccaatattttctcctacaacacttgcaaccctttttctttcttcttcaccttttatcaccatatctcttgaagccatagcatcaatcccttcttctaggtatgtatcttcctggattattgttctttcatccgttgagagctgggcgtgcttatctgaagagcaaaatctttcccctgtgacttcccgttcatgtttcatgcaatttgctgtatcagagtcagtgatgtatcagaccaaacctcttgcacaaacctttgaattgaatttgtctgtttttgtttgatagtttgctgattcctttcagatcttactaccgtttcgccatcatggccagacccaaggttgacccgatggatcagcggaacgcacctctcaggagtcatccgcccggacctccctttcctgaagccagggacgagcatggttctcgtattgtttttattccgccgtgtggaactttctctgagagcgaccaacggggccgttcccaggaacagaaccaggagcataaccaatctcacagtcctttcaagcgacgagaccattctgaactgcctcccattcagaccagtctcctggcaggggtggtttcagattcctcgactcgcccttcaggtaattcgaattcaggccctagtggagagcagcctttcctgtccaagctcctcgacaaatctccattccatccgaacaagaccaccacttccggagaggaaaataaaggccatattcagtcgaagcacgatggttcccaagaatccaaggatgaagaggaatattacaagtttcgtgccagcttgagcaacagcttggaggacacttctcctattgaacagcaagacgaaagtggacagagcgacagcttgctatccgagaagaaagatcaggttagactgttccgttccagtctacttgctggtgccaaggcccaggaagatcgacgccgttccaagcgcactccgacatcccctgaccatcctcaaattggtcctaatgcggtttccgaatctgaaacgcatgcttccatcgttagcgagagcaaagactgcgtcattggcgttaaagagaacgacgacttttctctcccggagacattgaaacctatgacctctttccaggaagagagcgaagaatctctggattgcctcattgatgaactggaggccgaagatggcaatgaacctgacgatgatgcaaccactctccgagctggggaaattcgcccattccctccttccctgctggaaaccaaggtcgacgagggcctcaacgacgcagaggtgaccgttcggcgcaagaagtatggctggaatcgcatgaaggagcagaaacggaaccatttcctcaaattcatctccttcttcaatggcccagtccagtgggtcatggaggtaagcaagatcatcattgaccactatagcgtagttggaaaaaatatatgctcacactgttttctcaattacaggttaccattcttctagctggcggcctgcaagattggatagatttcggaatcatttgtgccctgctcatactgaatgccgcggtcggatttgcccaggaataccaagcggggaacattgtcgagagcctcaaggtaactcttgccctgagatctctggtcgttcgtaacggttgcatcgtggagataaatgccgaagacctcgttcttggtgatatcattcacgtggaagatgtgagttcatgaggaaataggaaaaaaagactcaggctaatatcccattcagggcaccatcatcccggcagatggcagactggtatgcgacaaggcctatattcaggttgatcagtctggaatcacgggggaatctctcgctgtggataaacacaaaggtgaccctgtcttttcttcttcggtagtcaaacgcggggctggaatcatggttgtgacggccactggtgatcacacctttgtcggaaatgcagcggtcctggttaacaaggctggcaataacgatggccactttactcgggtactgcgcgaaatggcccgtgttcttctgattctggtgcttctcaccctgctggttgtgtggatcagcagttattatcgctcaaatccgattgtccagatacttgagttcacggtcgcaatcaccgtgatcggagtccccgtcggtcttcccgtggttgtcaccacgacaatggccgttggtgcgtcttacctggccaagcatcaggctattgtgcaaaagctctcagctatcgagtcattggctggagtggagatcctctgttcagacaaaacgggaacactcactcgtaacagattgaaattgggagttccatatgtaacccccggaatgagtgcggaagagcttatgctgactgcgtgtcttgcggcaactcggaaaaagggcggcgtcgatgccatcgacaaggtattcctcaaaggtcttcgccactacccgtgggccaaatctcagatcgcctcgtacaagactcttgacttttctccatttgatccggtgtcaaagaaggtcactgcctatgtgcaagctctggatggtgagaaggtcctttgtgtcaagggtgctcctatgaccatcctgagaacagtggagaaggaaaccacattgtgcgagccgttcttcaaggaatatgaggataaggtcaccgagtttgctagtcgaggatttcgtgcactcggagttgcccgcaagcgtcaaggacggccatgggagattctgggaatcatgccatgcctggatcccccacgccatgacactgctaagacacttgccgaagctcaagaactgggactctctgtcaagatgctcactggggatgcggtggccattgcacgtgaaacggcacgtagactcggtctcggaaccaacatttacaatgccgaacgacttggtgtcactggcgccggctccatgtccggctcggaagtgaatgactttgttgaggccgctgacggcttcgcagaagtctacccccagcacaagtacagtgtagttgagattctccagcgacgcggctatctggtggcgatgactggcgatggtgtgaacgatgctgcttcgttgaaaaaggcggacacgggaattgcggtagagggcgcgtcggatgcggcccgctccgctgctgacattgtcttcttggcacccggtctgtccgcaatcatcgaggcgatcaagatcgctcggcagatcttccaccgcatgtactcatatgtggtgttccggatcgccctgtccattcacttggagatcttcctcgggctctggatggtgatcaagaatgagaccctcgacctccgcctgattgttcttctcgctatctttgccgacattgcgaccttggccattgcatatgacaacgctacttattcgcagtcccctgtcaaatggaaccagccaaggctctggggtgagtcaattgtcctgggcttcattctcgcagtcggtacctgggtgactctgggcactattctgttgcaaggcgaggacggcggtgttatcgaaggctggggttcacgagatgaggtcttgttcctggagattgctctgactcagagctggttgattatgataactcgcatcagtggatctaaatcgagatcgttctgggcaaactgcccatcattttaccttatcgtcgccgtgggtgctgtcgatctgaccgcaaccttgatggccgcatatggtgccttcggtcaagccacatcctggttgaccgtcctccgtgtgtggattctctcctctggtgtgacatgtgtaaacacactggcttacatcttgatgcataactcgcaaaggttcgacaaccttatgcatgggaaaagtcctcgaaagaagtacggagagcgctcgtgggaagacttcggtaagttcgcacagactcaatgtctcctcgcagaattttaacgggaaactaaccaatcataggccttaacatgcagcgaatggccaaacaacatgagaagaccacttagtggtggctcgtaaccccgcatactgcaattgatgatggtgatgaaataatgatatgatgaatggggagatgcctctaatcgatgcattttaatgattttattaaatcaaggaggacagaagaatggaaggggacaaagtcttgtttctcatgaggcggccatgcccaaggggttgaggcctgcacgttctattattatctggacgctgaactgtgattaacagaccctaatttttaagtgattatcttgactcattgcctgctattgtatattgctaaaccttttgatacagtatcaattttggattgattattgtcacaataccttgaagccttgacggaattggctgacatttattttggagaaaccgcatcgctgcggccttacgaggcagtttgacaatcctgtatagttgctggtttcattgtcttctcacatacgatgagtcaagcatgcaatccaaaccatatgacttcactgactactacagctgagatagtattacctgtttaccgctaggcacattatgcatatacccatgaatggaaatacggcctaagcaccccggagcttaggctggatagcgaccaagcggcttaaagaaccaaggttttaggattgaaacctttcctcaaaccttccaacattttccctgacaaccctgctaagctggatgtgtatatgcagccttccaagctcgctatgactggtgataacgtgattcaacgagaatatggagaagtcataaatcaccaaacatactaaaagtggatattcgtttgaaataacattgaaaccaatcggctttgatgtcttttgccgcaaaagtctacggttctgttcaaaatatgttaagaacctggcagtttggtctagaccatgatatgttccctcccgtctacattggaagtagggctatttgatggtgtcactagctagaaatcatccgtctacataactacataaaatgacataatagttgattatcacccttgatatctggattgtataagcttacaagtttagcttactctttgacatgctctttggactgaatttgaataaattacacaaaacaagaccaaggctctgatgtctcactttggaaaaagtacttgtacattgttcgtgtcctaaaaagcccctacatacaatggcaccgatgtgccttcaacagtggccgaactagaattgcgccccccaccgtaatccacccgaaatcatttaccgagcagttctgcctcggtgtcggcctctttctgaaatcgcttttgtcggcggtacatccgccagaagacaaggctgccatggatctgggctgcggagaatgccagatgcaggaccggcgtgacaaccttgaaggcaagtcgccaccggtcccacgtgcttccaaacaaccacatcgtcacaaccgtctcggtgagtgtccccactgcggttgagaagcaggagatgaggaagatcctgctcaggagctggtgccgtcttgggaagacccggtagaggatgatggcgaagtgggggaatagctcgaacacggcgtcgaatgcgcctaagcccgaatcttgttagaatttttttcgtttcgcctctagaacagagcctcataaactcaccccagacggtacagaggacgaactcgatatacgtgtcgggttcacgtaaaggtcgcagactgatggctatggccgcttggccaatgaagattgtcccaacgtggtgcatcacggccacgggtgacaacttcacacggtagatcagctcgaaaatgtagatcccaatcaagatttgggcgaccacaatcagcatatcacccagtgtcactactgagcctttgacaaagggcgtattgaatgacggccctttgcagaaagcaacactgatgaacggatatgcggcgactaccaagataatgacctttgtgactccagcaatgtggtgattcacaaagccacgacggttcagctcgctcatctctgtgtagatcgagccgtacagacggcggataagaaatccctcgaggacataaaaacgaacgaggaagaagatgaccagtacaagagaaatgatcaaggctgaaaatggtgccaaatcggagattggccctagttgttttgtacccagggggattgggtgagggtgtcttttggaaaggtccattgtcgcagcgaatggacaagaaacgaaacgaaacgaagtgacaggaagtaataaagcaaaatgatgcaagaaaacaaagaatgaaaatcaaagcttgtaatacgcgttattcgcaacacgcgttggacacctgttgactgtgaaatcggaaaggttgaggagaattggggaaggagtcgtaacaaagaccggacgtagggcaacaacctcagcccccgtggctgtagacagcaaaccccgcatatccccgtagaaattgatctgcctgtactaaaccaccccgatctataaataattcgctgaccctatagtatattcagccccacagaacatacgaagttacaccgggctcactgtttctgccttggaaatggggttttcttgtcttacattgaaataagcttttacatatagatggtatatggtatatgagctagtagataaacgagagaacccgagtctctagtcttagacaagcagattggtatacagatccaaacctcgaaaggaaagattaagcccgaagccaagctttgcatgaaccgcggcaaaagcttaagtagtgggtaccgcaggtactctgcatgctgattggctgtggtattctcccttaagggtcattccccttactaggatcggttactacaccctgtttaggcaacaagataaataacaaggcggtctgcccaatagagcgtggatatactatatacatggaccgtgaatagtggagattgcgggaattagggaattaggttgcctagaaagtttcaaacttcggaaactttccggggaaaagtcaattgggaattgtatctaaaagactgacttcatgaacacaatacaaggcgcggctacctacttagatgtatatgacttttaacttggtaaatttaatgaacagagctgataggcaaagactaggaaatcaatagaccttgagaatccctctgggaaatccaccaatggctagcttgaatagcaatggccagcgcaatgctcgcaaatctgtcaagacataagcgtcggagaaacagatttctccattcgtaggaattcctcgtttacgaggtccattgtgttcccgaaatccagtcgtaatatagaaagactgtatactgcactttcagaatactacctggaaacataaccaatgagaaggttatggtatacttggtcgcccggcccttgctgagtaggaaagctggggccctgggcgtcaaactttgcgctttaattagtgccactgcttctgctgcagaatagattggaagggaacaatggccgtgctacctcggccacgtgttatgttgtttcaacgctaacccgaattcgatcgccggaggaacaatcatccgaaagggagtaatagttgccttgtagtcatttctaatgacttttttgatatcactttgcctagtaaagtctgctcatttagagcaaagatcatcaatccacacatttggcacttggcttttattaccagaagtagactgccggagaaagccacattcaatggctcgagaccttggaggcttcaaacgttaccacagaatcgtaccaagtgctattttccgctatgctacatttaataacggtgctctttgcagtttggcaactcatgccgtaacgggatacattgttcctgcgacccaagccaacatccaatgaatggtagtttcaattgggcagtaactgtccaatttgaggatgatggtgaatggatcatgcggtcacctagatctgactatggtcaattcccgagtgaattgagcggacggcttcttgcgaatgaggcttcaacactgaagtaccttggaaaggttacggatattcccattccagaagtttattcatataggtaagagtatatagcaggagatatcgactcattcactaaactcaaatagtgcatataccgactattgattagcgtttcctatatcttaatgagtaaggcacaaggatggccgcttcaaaatgtctgaatgataatttcgagttaagggaatgcatgtcccggggtcatattctccacgaacggtactctttagacgaagttcctcgtggtccttttgcaacagagtctgagttctacaacagtctgataactgccgtgttacatcatgcagagcccctccctcttacgccgcactgtttcgttgccccaataccttcccgcgaggactacgagaacgatactgcccatcaggatgcctgtgatctttggaacggctttgtggccattggagacaggattgattccgcggagaatcggttggattacatcattgtgggagattccctcaaagacatcatggcccaacgcacaactggctacttgacacactctttaccggatccatttcctctgcatcaccctgattcaaatgccggcaatatttttgtggacgacgatttcaatattacgtcaataatcgactggtcattttgttcttccgtcccactggcgatcctattggctcctcctgggctcccccaatcccgatatgcacttggcaaggaccttatcaaggtctttcgggaggggtataaggagacgtcccgcctaaagtgtcatatagaaaggcagtcgtttctctcttccgacgcgctcgctattctagaggacagcgagttttcctggtctcttattagacttcttacgtttgaatcgaccgacgatttgcgtcttttccgtaccctctggaatacagttcacactcctgactgtgaccttgagtcttttatcatctcacagagacacttgccccattatgtgcgactgtacgaaaagatgcaagtagaagacaggcatattgctgaacaccaaatggcaaagggattattttgagattaccatagatttgacagtggcacgcaatctcacggtggttttcaattcgaatgcatgctataaaccgcatttgaatcgttttcgaagtgcgaagatgttcatcgcggacccgaaactatgggcatgggtctcgaaggccaaagagcagcgcgctttatgatcagactcgaggggatacagtaagtgcgttctgggccatctaactaaccacaactaggtcagatttctcttccagagagattgctatatacttcatttatgtgaaagctgtctgacttttgtatacatcaagttccggatttgctgtcatcatggcttagctgtagtggtatatatgtaaccgtggtaggtaatggatcagataaaatgagttatacattatcacagaattctatttacaaaatagcaagggtatcatttgaacatgcagaacgatggcatcatgagatccatgtcacccacgaagatttctattctataatatcgtaaagtcagcagctactcaactgaggtggagatagaaaaagacaatcttacctgtctgagagccatcctcctctccgaagctcgtcgcttccaccctttcataccgatagtgatgaaaataacaccattccaaaagccacgcagggaccccaacgtactcacggagagcagaagcgagtaagatccatgctcatgatgtgcgaattccgcgatacggttgatggtcggtgcaatccacgttgttagcatcgctaagaagaaaagcgacggcatgatcacatactgcctcagcgacacacgtctctgtttcggggtttgataagtagtcgaggcatttctggatggaggcggacgctggaacgtattttgttccgtgatatcgcttgttatggtagattctggggtcaacccagtttttctccgggaattcgcatctgcgcttgtcgtgatgctgctagcggagttgttagaggtcagagcgatgtgatcgtcctcgctcaatttgaactcgtcgcgcactctggttatctcgataccgatgagagagtacagtattaggacgattactattatcagcctgttgtggaactattagaaaagtgcttgggcgggcgaatggaagtatgcgtaccatacgggtgcatagtagaagattatgcgcaggatcatccaactgcgagctactgagcaccagatctatagaatttttcagcctcaatgtttagcttcaagtcgattggtactcacggtttcgtcgccatatataggacctttctcatgaccgcggatgaagagaaagacaaaggcaggtatgaaggagagagcagtgataacactaatgtatttgacttcgagcttgcgcaaagacagagtatcaaaatgatagaagacaaccaagtatgtatccaaggccattgcgaatgtccagagcacgtcggctactggaaacctatatttttggggttagaatgtctttgcgaaccaaattgcctcgacaaatctctgtcaataccacatacatttgcagcgcgaagccttggaattgacatagcgacgaagtatccccagctgtaggtccactagtggatatcatggtggcgacagagtcgaacagattataaaaggcattgaaaaatattatacgatgaatagggctccggaagtgtcgcgagagagcaaaggcgccgattattgtgaatgagcccagaatagagagcactgaagagattcgccctgcaatggcaatccgattgagctcctcgggagtgtacgacatcgctcagaccataacaagatcaacagtcacaagaattgccaacatggcatctatttgaatttgattgaaatgaacaagaagacatagagtttgtaatatcacgttgtgccgatgagtattctttgtccgggatggcgtgcttttacgtattcaagactcgacagaatgaatggcatttgatgtcaaaacgctaacaatgacggagtgcggagtacacaaagcctatatataccgaaatggcgctatttcgagagctttaggttctaaatagcctcataactcttgataatggcgatgaagctgtgtgtccagatcaaggtggtgggctcaggccatgtagttccagccaatcatggtccactctacagggatcaagcagcttatgcgctatataaacaaaccaattgctaacaggttcctggatttagacaaacaacgccatgaccgcgagtcgaggccatttgccccttggtatctcgcaggtcggacaatagagacagccctaagaatgtagtagctgtgcctgtctaccatttggggatcgtagtcttaccagtgtcagggcagatgccgatctgtgtgactgcttccccttttcgttccgatcgggatctcgtgggacccacaggaatggccggacgctttcgatcggacccgacccgaccctgcacggcccagcgagacaaggtatgtaatgtgaaaggagaaagacccttctaagtacggagtaggttatcttgtctaagtattcgtgctacatctggtttatttttaaacagataaggagaaagttcggagacaaagagtcggtattgtcgctaggaaagaacatgtttcagctacgccaagaaaaatcaaatatttaactcgattatggattattataaactacactacacaggcaaaacaaacaaaacacacccaaatccttggttccgagcaagtggcattgcgcaagaagccggttccataggataccaatgtgggagcaacatgagcaaaggaaatgaaagggaatgagagggaacgatatacacagcgccggacgaacggagggaaacatcgatgcaaaggaagcgatggattggccatcaggtccatggcttccatcaaggaatgagagacacaggcgcaaacgcaaaggaatatgtaggagatatgtgcagtgggaaagggagggtgtcataatcaagtcctcgaagtcaaatggtcggcggcctagtctttagttagtatgatttaaaacagaatgtggaaggcaatttaccttgtcaaggttatagtcatacttctccaaggcatccaaggactcatcccgtgtgaagcccatgccggtcagccgctgaaggatcaggtcatcgccagtgtcgttgttcagagcccatccgggctgcttggatttcgcatcgttcgcgtcttcgccgatatcaggcttggcgttgtcaagaggcgcaaagagagtgtcccattcatgcagcgcagccggcttgggttctcccccgttgggcgatccgaccggcggggcggcggatgcatggatattgttgtcaaaagcaaagaactgagacgagctggattgggcatcggcaccggagacagcttgctgcttctgggacggggagtcgaaagagaaatcaaagtcagttgtgtttttggcctcctgaccctgtggctcgtcgtcgtcatcgtcatccgcttcgatcgcgggcgcaagattcattcccgcaaatgctgcctcaaagtccggtcctcccaccttcgctccaccgggtgggatagcagcatccgagacagaatcacggttggtctcattgcttacaactggcgcacccgtggtgtgctccactgaatgaggcgcatccggtgccacagtcggatcgccgcgctcgggcaataggccattgaattgaggaggaagatgaacgttatcttctttagctgtctcgtactctggagggctctgcagcaccccaggagatgggggtttgtttgaggttcccgggacagggaaagcagccagctgagcggcgtcaatagaatcctgttgggtctccttttggacatttggtgcgggaggcgtgaaattatcttcgaatccaaaagcaccctcgtcatcagagctctcatcttcgtcatcgtcatggtgtagctcttgaatcggggggaattcggatggacgtgctgatgcagctccatttggctgctcagctccaggtacaggcttcatagaagcaaacgcctcctcgaagtcgttatcttgctgggattcagaccgtttgtgtgccttgctgccgaacagttcgtcaaagcttaggtccttgccgtcttcgacctggctctcattggcgacaggagttgctgtagattggggctgctgaacggttttggatggctcggggaacctaactgagaggtcttgtccttcctcctcaaacggggaccgtgccggggtgccttcaaaagttgaggttggtgcacgcgtgtagtcgctagattctgccccggatgtaggtccataatcactgctagccgcctgggaaggcgtagcgattccagaggtttcagcgccgccgaatcgactcgcaggaggcgagaccatagtagacgacgtcacagactgattatcgttgaactgcaggaagtttggggtcagttgtcgggactgactcgcaggcggtggctcagagaaggccccagaaggaaatgcaccaggcaaagagccagggggaggagagactgatggggtcgtaacagcagaggtaataggagatgtgactgcaacctgtggcgactcggagcggaacgaagtgggtggtggtccggcagcagggaaagctgcgaatggctgtccgaagaggctgtcaaatgccttttgctgatcatttgacacatcgggggaccgtgcctgttcactcgagctaccagttcgacggaaaaacgggttggtgttttggcttgtcgtagaggcagcagggcttacaacatcggccacactgccggctggtgttgcagactcttgggaatactgtggggtctcattggccaggctgtcaatttcaccctggagcttgtcccgttcgccttcgacggtagctaattgctttttgttaatggcaacaagacccttctgttggcgcgcagaagatcgcgccttctccagtgccggcttgagctgggcaacttcagcattggcctggcggatcttctccttcaggctggaattctcctgctcatcgctagccaaggctgtcgaaacttgcgtgtattggttttgcaaatcctggcggctgccatccagcaaggcatattgctgctgcagtttctgcgtctctgccttggatgacttgaggcgctcctcgagtgccttgaaattggtaacctcttgctcgtacattgaccgtgcttgcgcaagacgtgcctcgaagtcacgcttctgctgcgaggtttgtgtaatgctttgttcagcaaaggtcctcttctcctgcacagtgtgcatttccttggccagagaacctatttggttggacaagttcgccagctcagtagtctcattggtcaacttgtttgattcttcggggtcattgtcaccgaggagatcatccgatggaggcgggggtgagcgaactgctctcggggttgccgccgatgcaccggtgatctgtggctgcaagctctggccaaatgtagaggttggaataaaaggcttgaaggtttgcgatgctgtctgaggggatgccctagaggaaggcgagcctggagtctggaaagcactattggagcctccggtagactgtggcatctgaggctgggcgaatggcggcgcgggcgaatcgaggccgaacaaatcatcagcagctgtccgcacaacgggggcgggagccgggggaggtgtgggggctgccattggtgcgggcacttggcggcgcatattgggcggaatgagcgcgggcgggaccacctgtggcagcggctccttgccgctacgctgcaatctcaccaagtacatagccacggcaaattcttcccggctcagctggccgtctgcgtcgatatctgcaaggtcccaaatttgggcaagcgtctcttcaggaagctgggccttcatgaagaaagatacagcttggtctccagtaataagtcccaacttggctgtgtcaacagtctcgaatatgctatcaaactgggccttctcttgtggggtaatcaaccagtcaccaccggtgacttgggcagaaagagagcctacaaagggggagcgattggcttggttcatagggcttgtagttcgctgagggccagtaaattgctggggaatggccgggatggggggcacatcgggtctcgccccaaaagacacccgtgcaggaggtcccctgcgagctgccgcatcgtacagaccaggcgggagggtcgcagggataccgcgcagggcgccagatttatatgatgtcagtagatgcatggcaatggtaaactcagtggcatccaaggcacctcgctgcttagtgtcagacaaaaaccagatgcgacccagaacctcatttgggagccgagcgcgttcgaagatctgttttgcaatttcgcctatagatcaaacagcgaacttgtgagattggcaccttatctgcagggaagagctacatacctgagatcatcccgttcttgacgtccgacttctcgaacagcgagacgaatttattggcatcatcaggctgaaggggtggaacacgaataggtccattggctccaggtggagggcttttggttccggattccgggacgcttgccgttgtgtcgaccacaattccgtcaaaacgaggcagagggccagctatgaataggtgcgcgatcagcatggattccacttctctgaagggaacatcactcacattgcagagccaactcgtccgaaggtgcacggccagcttgggcatgtccaattaaccgcagaacaatcccgaagccagatggggtcaggaggcccctgttctctttatcggcaatttgccaaatctacaagacccctcattagctatccctctcactattgcaatctaacacccatattctatccacataccaggccgagagtatccggggataggtgagtcttctcaaagaatggaacggcgatttcaccggtaatgaccccgaggttggtggtatcggcagcctggaaaagctggaagaatacgcgcttttcctctggagtgaggtgaagattcgggtgtcgctgtgctaaaagattgtgttccgtcagctccgctagatcgcgcatatagagtgcgagtgcaagaaggggaggggtggtgatgacggaggtcggcgggcgtttcccttgagtgcgccgaagctctctcacgattcgtattggctctagcaaggaatattaagtattacttaccggtatcagccattgcagtgtcctaggaggagcttaactccccgccttctaatgagttcacaatcgttgggtgccttggtggacaagttggagacacgggatgctgtcagcctagtctgaactcgcaacaagcatgggcggagcgcagtatttgacagggacggcaagggcacgagatataggtaaatctcgagctccaaggaggaaataaacttcaagaggaatggggattgaaagtggctggaatcgatgtcgtagggaaacgttcctgtggctctcaaggcggtcagtcggtctagcgcccatcctaacacgttgtctcgccctgaaagggggataattctaacttggtacaaaggataattgaaagatgtttatgaatattcaagtctgccagatgatagaatggttcttgcacatgttgatccgaggatattggttgttactgtggtagtttctgaatctcaattgcctatatacaagcgacaatatatgccagctggagaaagaaaggggagaaaagaggaaaaccatgattatagtaagcaagccaagtatattcggaaaactctctaaagcatcactcaaaggcgtgaactgatagatagactgaagaccatagacaaagcgggaactacaagacgttgcatagacaagatccaacattggcagctcctaccctgaccataaaaagtgttagaactctctctcgattggtacgtgtcttcagggtccttttgtatacttccgataccgacgtgatcttgaaagaaatacaacgtaaggtcctgtagcgtctgctggcagcagaatatataaacgttcgaactggtctttcccctgtaacgtctatgcctgcggattatgtgtattaccctgaaatctacaatcaaagccctacgacagctcagttctagtcatctgcttggcatttacttggttgcctggccttccgggtcttgatcaactcatgcagctagttcatactgtacggtaagaaatcatggaatgagaggaagtgtatacatgtattgtattcgccatttgcggagtgtaagagaagattaaatctagtcatattgcttcggtggtaagttgtccgcgtagttacagggactggtacgctgacttctgcgtcaggggcagtgagaccgtcgccgcctatattccaatgatacattttcagttgaggcgtgaggtatttcagagagaaccagaatacaaaatccgagaaagatattgagaaacagcgtatggcttcacggccttggggctatgcaagcccggcgcccaagacattgattcaatgtccgactatgagacaacacacttggagagtcgacttagttacttacaaattgtacactttataagatccaaggagacagcgttagaaagtaataacaatggcatacgtatgtagaaaccctaaaggtggatggaacgaggggaaatttcatcctgcttcagggatattaaagatatatcgaacaacaaagccagaaaatcattggcagcaaaacgtatgttcccttctatttgcaagaagcccgatacacgcatgaaaaccgaacctccagactcgcgttggtccccaagccaacccgtagaagtgaaacaaccaagagtccgaagaccggtcaaataacatggctaatctagtactcgggctccaactcctcatcaccctcgatggagtcggaggcgacctcctcgtaatcacgctcgagagcagcgagatcctcacgagcctcagagaactcaccctcctccataccctcaccaacgtaccagtgaacgaaggcacgcttggagtacatgagatcgaacttgtggtcgagagcggaccaggcctcggcaatggcggtagtgttggacagcatgcagctatattataattagcaccaaatttttaatcaggtttcaagacccgaaagaatcaagaagaaaacttacacagcacggctgaggttagcaagatcgccgttggggacctgcatgggaggctggtagcagataccgagcttgaagccagtagggcaccagtcgacgaattgaatggtgcgcttggtctttagagtggcgacggcactgtgggcgtccttggggacaacatcaccacggtaaagcagacaggtagccatatacttgccgttgcgggggtcacacttgaccatctggttgttgggctcgaagcagttggaggtgatctcggtgacagagtgagcctcgtgggcggccttgtcggaggagatgatgggagagtaggcgaccagagggaagtggatacgggggtaaggcaccaagttggtctggaactcgttcaagtcgacgttgagggaaccgtcgaagcgcagggaagcagtgatagaggaaacaacctgagcgataaggcggttcaggttctcgtagctggggcgctcgatgccgaggttgcggcggcagatgtcgtagatagcctcgttgtcgaccatgaaggagcagtcggagtgctccagggtggtgtgagtagtgaggatggagttgtagggctcaacaacggcagtggcgttctggggagcagggtagacacagaactccagcttggacttcttgccgtagtcgacggacagacgctccatcaggagagcaccgaaaccggaaccggtaccaccaccgaaggagtggaagaccaagaaaccttggagaccagcacaagcgtcggcaacacgacgcacacggtcgagaacctcatcaatcatctccttacccacggtgtagtgaccacgggcgtagttgttggaagcatcctccttaccagtgatcatctgttcggggtggaagagcgaacggtaggtaccggtacggacctcatccacgacattgggctcgagatcggcgtagatggtacggggaacgtacttgccctgacctgtgaagcgggggagaaagaatgttaggaagctgtgctttgcaattttgcatatcaaggcgggggaacattgaaaaaatcagggttttcctaccagtctcggagaagaaagtgctaaatccgtggtcggggtcggccttcttgcgctcctcagtgaggaatccatcgggctattatccatgttagtcacgggtgtttacctctcggcaagaaaatagggggtacgggtgcccgagtcaagattgggcgccagcacgagtttggaattccaacgcacctggataccgtgctccagacagtacagctaaaaaatcaatgctgttagtttaccgaatacttgttcctcgatgggttgtggatagttacctcccagcaggagttggcgatctggcaaccggcttggccgactgtagagaagggtcagcgcattcatcgaagaagatatatcaagtctgccgagtagactcgatggacgacgtcgacataccgttcaaactgataatctctctcattgtgatcgagtcgatgttttttcaggctaaaaaatcagggaggggaaaatgaaacccaaacaacaaacgcgacggtctggaactctcagttaggctcgaatacgaagatgcacaatggaagggggcggggttgggcttcgtacctgaagaatggaggaatggacgagaagatggaaaggaaaacaaagttgaccagaaatgttgtggaggaggaggcgtctgtgctgtacagggggaagttcgttgttgatccgttcgttgggtcgcgtccggcaatttgattggctcctccccggtgaggagtagcggctactgaccgcctcgtagtgatctcgtgatgccacgtgatatcattagtaccttgtgacatgtggatattaaaaaaagaatacaattcaagcttgaatagttaagataattcggcgctcgaagtttgccaaatttgtccagtgaagtgcccagggcaactcatcaagggtgtgtggtctgacgctgttggagctatcgatttaggatccactagggggaaccacctcgaaccaccattcgaccatcatagccaaagtactaagacacacacctcggtacagtatatacattccaacattgcacattcaacttttgaatgctaattgaactcttagcactacaattgtcaaaaactgcccgagtctcgtcatgggccgagaataagacatcactaaaacatcatctcgttcaccaaaaaactccctatattacaaagcagaacatcaagtctctcatcatgcatataaaactcattcccaccctgggactcatgctcccgctcttcacagcagtggcgcaagcaaacgtggaaaagaccatctttctagcaccaataccagcaatcgtcccttccgagcagccagacctcgacgacctaggtctagagcgtctatcaccacagaaacccgtggtgcgaacccagttaaatgcctcattcccaacggctgcggccccctatggtatagactcgtggttcttccttgaaaacctgaacccgggccagcggtatgaagtacgagtgtgctggctagcgacagtaagacaacccactaatcctccctctcgatcgtcatcttttacgcatgtaatacacatcaccgtatataaacacaactaacaaccccctagcaaccaacaacattcaccctcaccacctacccgctctcaaaaacaatcgaagacaaaaacctcctgtcttccctgagcatgtacacagcagcccgactcgcagcagcagacacaatccaagaaaatgtcatcccgcacagtgccaacgcacgcggtggcaaagatgtgctcgaccctgtgccgacgagtgactcggttttgtttctgcatgtgcacgccgcggcagattacttcagtacagatcaggcattgatgcagaatgtcccacccgtggcggtggatttgattcttgatccattcttgtttaatgttttcccgcgctcgctggtgccgactgctgggtggattgtacttgttgctgttctcgcggcagtgctggggaggtggattgtgaaggaggttgggagggctgtggatgatgctaggaggcaaagtgttttggaagagatgaagaagaaatgaggttgtggttttccaaggttgtgtgtgttttggagatgtacgattgaactatttaaccgagcaaagaaaacaactgaaatatatttctttgttcctctgttggaacctaacgtggtcttttggcgactacctcactgttctgggaatacttcatggcgtccacgggaatgttaggtaattaactatgacaacgaaggttattaatgatgtccaccgacgaggaatgagtgggagccgagttatgcagagaatacccaatatcatctaagtaaaaatcttataaaagtactatcatggactctacattatcattagttacaagggcaagatttcgtagccagagtaaaactatagacaaggccaaatgacatagacgtgaaaggcaaaatccagataacataacagaacaattaaatgtcgaggtcgcaaagtcagatacatagggaggtgtgcttggatacaggatgagcaagggcaatggggaattcaaagggaaaagccaaagatataagcactgtatatgaggcgcaacagggacaagggtaaagcaaaaaaaaaaaaaaataccaaaagttcacgcagcaggaaccaacgtatagggccaatcaactctcccccgtttctttcctctctatatgcgtctccaagaaacctgattggcatttatgccagtctattcaagataagcccacgctcatctagatcaaaggacaagatcacaaactcccgttaaatcgtagctccatgaatggctcagccattgatacaaataacgtagcttaatcttaagcttagtcttcgaagaagttgaggatcgcgcggatacccctagagcccaggccgtgggacgggtaggaaatgtagagcggatcctcggtggcgccgagcttagcacggaattcactcttgcgcacaagatggaactgtttagcgagggcttcgtaggtgtgctccaacatcttgaccttggttccctgcaagttgtgacctgcggtgaactgggcagtggcgccagcgccaaatgtaaggcctttgacgccactcttagcggcggtctggattgcatgcgtgacaatatattcgatagtaccgctcggcgcgccggggaaatcgagactgtacttgacttgcataccatgggcaggagatagcattgccaaagcgacgaaggcgcagacgacgccattcctgtccagagcgtagaagtaccaacggtgctcgaagtcgcaccatgggcgaatctgggacaggtgcacttgcgcgcccttgcggttggacagccactcggtgatacggtcgtcaatcttcttgcgaatatcgtctggaaccatctcgccttggttcatagtaactagcttaacgttctcggtctcggcgcgacgcagcttacgtgcaatctcgccgtcagaagcggctaggttgcgcgatgggtcaatgcgctcttcggcgatacaagacaaactgcgccagcctagtcgttcgccaagaatagtctcgacttcaggcgagcagaggatccacacgggcttatacttggtttcgcggcgtagccactgcaagaattgtgtaattgtgtgtgtgtactgcttgggatcacaggctgggttaccgggaatgatcgcataattggaggagctgggcacgtaggcgacagctgcaccagtagtcatgtcacgccagatcttgaagcgttcatcaaaccaggaggttgatgtggcatcgccgtagttagcgaccagatgttccagaggctgcagctcactgacgtccgaagctgtccgagccttgtgctcatggtgccacggcggttcgatggtcgatgattctgggtggcggaggttttcagagacaggctttgctggcaaactcttggggtcgcgagggaacattgacgtcagtcggatgttgcccagcttgaggataagcatcatgatacgttccagaccaactccggcgcccgcgtggggtggtgcaccccagcggaagccctcgagatagtcttccatatcatccgggttaatgcccacacgacgcatgttttcctccagcatgtggggatcgtggatacgttgaccacccgagacaatctcttgcccacgaatgaacatgtcaaatgagttcgtgaagttgtcgtcatcaacgtcgggcatcgtgtagaagggacgtgcaccacgagggaatttgtcgaggacgtagtaatcagtgccgtacttctccttgacaagctcacccaagtgaatctcatcacgggtacccaagtcctcgtcaaaaggtagcggattgccctcttcgttcaaccagcccgagtcgttcaacatcttgataccatcggtaaaacgaatgatcggcgtcttttccagccatacgacatcttcggaggggaactggtacttgatgagatcaatttcgcggcggtgtttggtgtagatgcccgtgaggatattcttaatcacagcatcaagtgtctcaagcatctcatggtagtgctcatcaatagccatctcaagatccaatccagtatattctgtaagatgacggtgggtattggagttttcggcacggaacacagcaccaatctcgtagacgcggccgaaatcagaagcgatagccatctgcttcgccaattgaggagactgagcgaggaacgcagggcgaccgaaatagttgacttcgaagacactcgatccagactcggtagcagcgccttgcaatttcggggtatggatttcgataaagccgcggtcgtcaagggaagtacggaaaagattgcatgtcacggactgaagacggaagatggattgcgaggttgatgtgcgaaggtcgagaatccggttggccaaacgtgtccggtcagggatgtggttgcggcggccctcgatcttttcttcttcggtggtccgaatctctgcctcgtaaacactgaaggggacaggctcctcgcggcgaacttggaggtgaaccgaatcaatggccagctcgacatcatgaactgagcagcccaacactggaacctccggtttctgaacagtgccgcggactgtcacaaaagagcccacccggaggtgctccacccactggaccatggcgagagagattgctccctcccgctcatgcaaaacaccttggaaggtacctagctgttgacggaataccaggaacaccagtttggcactcattcgacggatgacgtgcagtcgtgcgctgaagaacactttctgtccctccatggcaagacttatgtcatcgagccgagtccgcacttctcgtgttcgaacggacgactgcattaaaggaagctcgccataacgcgctttcatttctggcgtctcctcggctgtggatttggcaatttcctcttccttgcggcgatggtcggtctcggagaacatttcctcgctgagacgactgcgctcgctgcgacggtgctgacgcaccaaccgcttctgttggtttttgctcaaggcaccggtagaagagtcgtcggagacatcatcagacgaagagatatactcattcttatcacggaggaagttgccaatgatgctgcgacgaggggatgcggtaggagaaccggaccgatctgtcgaggtacgaacttttgatggcagagcagagcgaacgttggaaccggaggagtcatcctcatttcccaagtgtcccctaatggccttggagagggcacgtttaatcgacataatgtgcttaagtttatgaagggagggggagaagaaaaaagagaaagaggagggacctcgggactttgtatatatatgggaaaggtgggggggggggctgcgccggaacgggcgatttcaaatatttcaactctgggaaggcctagagggtaaagagtccgatagcaaaacaggcaacgcgcacgtgaattagaacaaattgagccaaatacaatgacagaccaagagtttaaagaagtagagtcaatcaaaacacacacgtaaatttccaaacttataaatcctgcacacggccacagggctggaaaagatgtgatgacatcatccgaaaccaaggaatccagattttcttggtatggggcctggtggtccctggggagaactggccattgcttcgaacttacgactttgtttccctattactccaacggtttctctctcgttattgttatttccctcgttagtatcagttggctgttttgttcttcgttcctcggccaatgtcagatatctcgtctggtcttcccgtctgtccgtcttatcttcttatcaccgccggcttccgggcccctccgatgcgtatgccagatcagtagatcgaatccgttacttttcactacagcatcatggcttcgtctcgttggtggctgtatgtacaggccatattttggcggtttctgatgcgcattggcatgttcttgcacgagattggtccgcgcccaccccgaccgttattcacccgtaccgtgatatccgactcccattgccatccggtcgtcctccacttttactgtccaccggattatccagagcagcgaaggctaggccatcgcttccccgtcgctgtgaacttccacggaggcggtttcacgctcggtgctgctaccgatgattctcgctgggcgaaaatggtgctggaggataccggcgccgtgatggtgagtgtcggctaccggcgagcccccgaacacccttttcctgcggcagtagacgacggagtcgaggccctgctgtacctggcaacacatgctagtgaactgggattggatgtgagccgagtggcgttgagcgggttctcggcaggcggcaacctggctgtcacggtgcccttgcgactgcgtggcagaatatccaccgaagtgaaggaacatttgggtcgagccgaatccacgcaaaatctgctcagtcaggtcggcgatcttcacatcgttgcattgttctcttggtatccgattctggactttgaagaatctcgcgatcaccgtcgcgctatgagtctgatgccggacaagactctccctgcatttttcaccacactctttgatgaggcctatcttcctgatttggacgaacgtatatccccctatgcatctcccatccacgcatctgaccgtatcctgtctgaagctcttccccgcgacgtctttttctttatttgcgagtgggatatgttgatgaaggagggtcaatctttcgttcgccgattagagagcctcggtaaacgtcctcgcgccatgcttattgagaaagcccgacatgcgtgggataagtcacctaatccgtggcgggaccaaaatcgcgtggaccttttataccgcgatgcctgtgcggatatgaaggctatctttgaccggtgatcgatttgcttgactatcaatcttcccatgttttcttctcttagcactgcgggcttgaccttggcgtttgaaccattcatggtgtcgactttacatagcgtttttgatatgtttatcctactataactttattatcctagtctacaacgtacataaagtgtacctgtagctgacttatccaattgcattcgatcgcattggctgggatcatgtatccacctcagtggcaactttaaaaccaagcggagatggaaacatacaacgcctatatgctaacaaaaggacggcctacatatgtacgatgtgccaaataatatcactcggaacctcctcctttccattgtagtgcctcatctcatgccactttttgaccacaggtaaagacactacctcaatgcttatgtataccctccgccacttcttggtcactgacaggcatgaaaacacctggtaccagcaatactcatatttgcgccagcaaagctgcacaccgctgagcagagttttccgtgcctacaaaagacacgctgggacgattatcgagaccgatttcaacaagtgtcgaagctaataatgttaaggaacaaatcatctcgatcgaagcagtgtggactcaccgtcaggatcataactgggccatcccagggctttcagtccgtgttcgggatcagcgatgaatgatccccaggcggatcgcatctgaacctgcagctggcgctgcgcatcagactcagcaatcccagtaatttcagcagattctccaaaaatcatgttaaattcgacaccatggtatgctccactggtagggtaaagacgggtattctcccagtccgcgttgtattgaaagcgccaaaccggtgtatgtcgacgacttcggtgtgcggcttcgagattggatgggcagaagaatgtctgcatgttgaaatcatcccactgttcgtctgtcagtgtcgatccctgggcgtaggtcgcgatcttgtagaatcccgcttcattggcgttgtgcccgaccaagtagggctgttggagaatatggttagtagctacattgacccatcgactatatttgagatgtaggagagcccactcacgatgcgggcgaattttccttgctgcgaaagaagagtgtaattctcaaaaacagtcacgtcgtccacggtgggctggaaagccggggatttccttgcagggtttgtagtcggaaccttcactgcactagcagcggcgagaatggcactcgcattctgctttctcatgcacggcaaaacatcccctgaagacccacagcctaactgggcagacacagtataccaatgctccgctgcagttgtcctattgtttgttgggaagctgagagctgtgccggaatgcgagatcaaaccggtaactaggggttcggactggtaggcgtatgcccaataatcaacagaagcacttccgcaagactggccagatatagtgatgcggttaggatcacccccgaatccacgaatattttgcttcacccattcaacggctaaacgttggtctagtagaccaagattaggagggtgtccaggcaggccaggaaacccgaatatgttcatgcggtagttgaccgtcacaacgattacatcctcagtaccagcaaatccgcctccataataaaaaggagtatcagtcgtgccacttgtccatcctataacatggatcagaaacaagacattggaaaataagtagcaaaaacttactaccaccgtaaaaatgaacatagacgggcttgagttgatttgagtctggctttgaccaaatattcagagtcaagcagtcttcactttgagtgttgttatttatagccgcgaaggcctcgaagatgctgtcaaattgcggagttttgtcgggatagtcgaccagcttcgacaccgagtacatgcagtctctgtagattgctgttaaagaaagtagaatacaatcaccgcaaatagcactcactttccctatgttacgttcatgtcagacattcatacattttatgcacttcgggtgtaagggataagttgagaccatacatattctgaggcgacatgaacacccctcggcgtgtaaggttggggcggtgcgaatcgcaattgctcgacaggcggctgcgcgtaaggaactccgagccattccgtgacccctggattctttgatgcctcatggccctgaatgattccattcgacccgacatgggcctgtcgcgctacggcaaccactgcgaaggccagccatattactcgcatgatcaaatatatccctgattgagtcggaggggcaaaatcgagggaaaatagactgtgagagaaaccgcgtgttgaaaatcaattgacgcatttaatatatcgtcaatatggctaagtggggcttgcatatatatggagcctgtagaggtaagccctagtcgatctggcgtgctttgattcgggttcgctgtctcaagtctccatttggcccccaatgagccgtcccaggtcatatctaatgcctgctcgcggaacaccggaagccttgatctttgatctcacgagagacagctctctctcctcgctttgtactcatgaaatgcacattggctatagcctatgatcgttccgatctaatccaaccccatttggcttgacaatgttatccagagtatgacattttatggccaaacaaatgacggtgtcccagataggggccatgtgcttttcattaccgcgcttgtgatggtgctcactgcggccatatttgttaccattcggctagcaacgaggattcatctgaaaaaattcggttgggatgatctgttcctcgtcatcgccctagcggcatcggtcatgacaacaattgctgtcaatttaggtaagtcaaaagacatctgatggcgggtcttttagtcacaagctgacctttggtttccagccgtcgtgcatggttatggcaggcgaaaagcagatatgggagagggtatacatatagctctgaaggtgcagtgatatcaacggtagctaatgctcgttcaaatctctaacactcccccaagtggttttttgttgcccagattccatataagattgccctcggctttaccaaagcttctatcgtcctcctttacctccgagtatttatcacagagtctttccagcgcgtgggaaagggtttcctaaccgtcattgccgcatggacagtcgcatcagtcctcgtcacaatctttcagtgtatcccaattgaagcttcttggaaccataatatcaaagtcaaacaatgcgtggacaaagacagctggtggtatgcatttgcgggaattaacacggttactgacgttctgatcgccattctccccattcccccagttcgccacctgaagctctcgaagcgcgaccggattgggttgtgttttgttttcggtgttggagcattgtatgtatcatttcatcctctcttctctatgcattaatcaggagtctcatgtgtacacagtgtctgcgtcactagtatcatgcgtacggttgcagtgtctcaaacatcgactggcttagatcaaagctgtgagtatcttgggagcctcgaaaaaagggaatgcagagaacagttgctgatcaaaatttactataggggattttatccctcgctcagtctggactctcgtggagtgcaatatgggaataatctgtgcgtgtctccctatgatgcgccggccgctaagttttctgtttccgtggcttttcagaggctcttctcggaatgaatcagaaagacttagctatgttcccattgagttgaggtatacaaatcgccaactgcgtccgcgcgggagtcaaagccaagaggaaattctacagtcagatgtgcgagataaaagggctttggcggatgaggaataagataatcccatctgtgctacgacggagattcctgtcggtttttcattgcttgcgggttccaaactgcgtacaacacctttagattagagaaagaatcatccaaacggacaaaatatgtatgttaacgatcctcaatatctgcatgtcgtttattcactagtctttttgatactactggtgagcgccatagtcagattcgcaaacaaacagttatggcactgggagttatttccatttaaaaaagaggcgttggttggtttatgataacgcgattatagagaaatttctcatttgaactactattacagattctgcgagcttgtcaattggaaaatggaatatttgcattaatgtagtgctgaattttgcagaggcagtgtttcgctgcgatgagtaattccgctagaggtcttcaagaggctctgagtggccacacaaggatagtcatatcgtgttactatgacaagccaagcaaacgagtatttacacaccaggaaatcttcctggttaaagtgcccaccgaatgaggtatttggtggatgaatgttgaatgtaacaaatcgagagtagtggtttgtaagtttttgaacaaacaactcaaaattcgtccctcaagcctgtctcctgctcctcgctcaaccgtttctcattcaatgttttccaccatgcgtgcgatgggtcttggctcggtccagtttcatcccatggcttcgggctgaggatgtaatgtacatttttcacattctcatcgcgccatatagcgtcatgtacaccttcccaccgcaaggttttgagtgcgttgtatatgtacgggagtgcaacccagcgaccataaaacaggtcaccgagaagggactgatcggcaaaatcataattcgatgttgtagaagcaccaagctgtgcaagaatcttctcgtaggttgcctgagctgggatcaccacctgaaggcctccattgggtatccccaaccctgaagtgggtgaagcaccggcgatttgcgcgatgtcgggattttcatgctgcgtagtatatgcgcaattggccggaatcctttcagaattatcgaattagctgcactgtatgtcgcgcttgtatattcccaaataaaggttgctcttaccagtctgcgggatagtgaggtttatgaagcggattgcagctgcaagcatggctagcggcaaagactcgatctccgtttccagccatttctggtgaatccaattcgacatccattaattcatccatatttttaaggactagcatgtcactgtcaagttgtacgacacgctcatattcaacaagtgagaacggtgtgagtttgctccaacaatcgtagaatcgtacatcgttggtgaaatccttgggagctgacggcaggagatacggcacatggcgcttcaagattttccgggaatcaagggctttgtggccttcggcagggaatgtgtccgtatagagcacgacaagcggatactttgacccgacctttctgagagagtactcaagggtcaaaagcccagagaggtatgcagtatttgttatgagggtggtccacactgagaattgttatcatccggagaaagaaagtattgtagagtttcagattgccctgtcgatctgtaccttttgaggcatgtggctggaggatattctcatccatgatttgattgtggcgctgaaattgcttttttttagctctgactgtgattgattaggtgagaagtcagcactcacatttagcaattgtaacgattggaattggctgttgcactaagtacaatgcagatacagggagttagtggagtgacaagggagcgcgcattgtgggtgaggggttcccgaggtcccttcctccggtatcggtctacccaatgaggggttaagggttagttgtggtgtgcatgcaattagttagcatatccaatgaatgaaggccacgttcggctggataacactagactggaaagaatttattagcgaagcactattattcgtcggatttacaatcagagttctttaggctaattagagtagtcccgtggcttgacctagtttctatttggttcataactacggagtatgtaacccgtattgatatttatgctcttggtgagctgcataactatcgatgtattaacctacgtttattttctatgtacttcttcggttgaaactatgtggtcttactccgaatgacaatgcctcaaagatacaagcgtgcatgtaacgagccgaaacacagatattttagggcttggttgcttaaccgccgacgctaggctcaatgcaaatcgatgtgcatcgatatagagtgattggacatctccgggcgcatacttgcattagttagatatggccaacacataatagtaggttaaatttaggcatcctactttacttattacaatattaaggaactatcgagaagcagaaagccgagtgctgcattatatctattcataccggcccaagacagcaacaattggatttgcgcttcgaattgtgtattacatccatccctagcatatttcaagttgattagccaaaatcaccattgaagtttcctcaaattttgctacatggctttctttagctgtgacactcgtcggtcttggtcctatcgctactcggttcggcaccattgtcgaccggacagatcaattccatgacctacgagacatgctgcctttaggcagccggtggcgccgacaaccatatataccatggtaccatattgtcaaacccccccccctgttgggcccttatgagcgcaaacctcttgcatgggctctgcgggaacaatatggtatatgtcagtggttcaccatcatcatcacaccaagttggccaagcagcatggtcggtgttatttgcagttattcaccgaggctctcatatcaataaataacacaaattatcagagaagctctcaacacatgataccatgggatttgaccatatagtcacaattaccaacgaatcttaccagatcccaccaagtgaaagctgggctgatatgcctcttcgtcctcttacgagacaaaaattgactacttgtactgtgatttcacgtacaacactcatggcattgttctgtaataacaaatgcgcggcgggtattttgttatagcagcgcttctggtcatcgagctgcctatgcatcctactgcggacaatggcgcgtggaatggcccattggagaccttgcacgggttcacttttgtgcgtatgacctgcacacgttatcaaaggacccatatccggcaagattccagcaaagagtcgataagtgcttacagatactggctggggtgattgaatcgcactcatcaaatacattgaagtgtgcttttccggcacgcaaatcagccggtaaatggattcttgaatatacacctaaaggattcggcggtgcgcatggcggaagacatctttacaacatgctcggcggcaaagtgagcgaggtcgacttcttgcccatgaaagtgatacacacagaaatagaagcatcaaaggacatggtggttcttcacttgcctagcaaagattccgatgtgcgtgatgtgattttatacgtctcaaggcaagaatcggccattttcaatgaagccgtggataaacttccttggacatttctgtcatggtcaattcatcgagggctgtgtgatatcctagttgcttttgcaagggaaaggatggaccactatagaaaccgtttagcagagacattctgtcttgcggtagcaaaatggccagaaagattggaagccaggggatgggacccgcggtttgtgagagaagatattgcagccatggcagcaagccctgttacgggcaagccctgttacggcgggccaggggaattcaggagatgtcgtcaggattgtgactgaaatagcagcgactttatctggtggaccaatttcagcacttgatgagacgaggttttggagggacgcaggtcccacatctgattctccaatccttgacccgatgaccgtcatcgctcttgtcaagtgtttcgtcttagagtggagtgtgaacttgaactaccagatgtaccacgattttcctctagagatgtacctaggatgaacaaataagaactgttcgaaaacttaacattttgttaagtgactcattgaacagtgccttcgtcctcggtcattccgcacaacgatcccactttactcttcactaatgctagcatgagccattacaagtacatcttccttggtactgtcaatccgcatacagactttgcccatttgaagcgcgctaccaattcccaaaaatgcattcgtgcgggtggaaagcacaacgacctcgacgacgtgggaaaggataactatcaccacaccttctttgaaatgctaggtaactggtccttcggtgactacttcaaacaggaagccgctgagtactcgtgggagctgctcacacgcgtgtttggtcttgaccccagcagactctgtatcacctatttcgaaggttacgcccccctagggcttggcccggacattgatgctcaagagatctggcgtgctattggcggacccgatgaccatatcatcctaggaaacatgaaagataatttctgggagatgggcagccagggaccgtgtggaccctgcagtgaggtccactatgatagagttggtggatgaaatgccgcttatctggtcaaccaagatgaccccgacgtcgtggagatctggaatattgttttcattcaattcaacagggaggcagacatgtctttgagatcattaccgaacaagcatatcgacaccgggttgggcttcgagcgcctggtctccatcgtacaaaacaagtcatcgaattatgacacagacctcttctcccctctctttgaaaagatacaagaaatcacaggagctcgtccataccaaggaaagtttggcaccgaagatgatggcattgacaccgcctaccgtgttgtggccgaccatgtccgcacatgcacggttacgttgtacggagaatcttacgacgtggtgtgcgatacgcgaaagtcggttctttcttctcgaagattgtgcttacagttgtcgaacagatcggggatatcttccctgaagtcagaaggaatgaacagaccgtgaaggagatcctcgactaagaggaagaagcttttgctttaactctagaccgaggagaagcgacgtttggcaaatatgcgcagaagtgtcatgagagtggttcaaaggacctccccggagcttacgtgtggctactatatcacacatatgggttcccggttgacctgacaaagcttatggccgaagagtaaggtctgaatattgacgaggacgaagtgtccgccgcccaagagatggcccgagaggttagcaaaggcgaaaagaagagtgcatctgatctcgtcacgctcgacattcacgatctcgctgctctagagtataaagttggcatgtgtaaaccagatgatgtggctaagtataggaaaggttccatcagcaatctcaattttggacaagaaactgttcgcaaggcgactcgaaggaagcatcaaagagatgatgaaagagcaaaaagaaacgcagagaagtcaagtcgatgctgccatcaaccatgtcaaaaccgtcatcgatgataacccagccagcacctcgtttgttgttaacctcccgactgattgttccgccaaagttattacggaggccattaagcatgtctcttctatccacgacaacaagagcgtgtatttcataggtgtaggtgccactggcagggttgcccaggggtgctttgtctcaccggtaagtttgtttcaaggaatagaatgagctgttttaacctatattactagaaacacacctcgaataggctggtggcaaatgaatgggctgcacaggttgcgaaagtcgtgggtggaaaggctggtggaaaggctggtggaaagggtcttacaagtatggggagcggaccggataaggccaaagtggaggatgggatggtggctgcgagaatgtatctccaagaactgcggatttgatcatctgagaagatccggaatagaatgcatacactgtggattgaaggagaaacaatccggccatatccaaggcagataactcgaaacctacacaaatcagcctcaagagttacaagtggagattaattgtgccaaccagccaatagaaaggaccaatttcaaatttccaagtgattcagtcgcttaatcgggactttaagggtcctaatgaaatgaggtctcacttaaaaatagggtcctaaaaaagtcagggggagaagaatatcgtgatggacatctcaatctctcagcatcaccctaaccaatcccacggcatttcccggattgatagagtggtgtattattccctctctggaacccatttctacttctacaccgtcacaccgtcaccatgcgtgctcaggggcggacattcacaaaattctcaaccgcaagcatactgatcctatcatgtctcttcttcatcctctattaccaccccctgagagaagcaacaccagaaagctaccctacatatgatccatctagaaagggattccagctggcgtcgccgcggatcccagagaagatctggtacaaagttggacctaaaggattgagcgaccagtcagaggaatggctgcacgattgtctccacaaaaacccagcgcatagcgcgcagatcatgaccgacctcacgggcgatcaatatgtgcaagagaacttcggcgatcgtcccgatatcgtcgatgcctacctttctctctcggtaccgattctgaaggcggatttcctgcgctatctgcttctcttcgtcgaagggggcatctgggctgatctggatgtctcgtgtggggatgtacccattagagaatggatccccgagactatgcgtgctaaagctcggctggttgttgggtgggagtttgatgtgggctggggggagaatttcatccggcagtttgagagttggacgattatggcggcgcctggatcgccgcatctgttcatggttatcaatgatattatggagggcattcgtcagaagacggaggagtatcaggttccggtttccgggttgactttggatatgacgggtaatgtgatcgactttaccgggccgaggcgactgactcgcgggattttgaagagcttggaattggctcgcaatgagacgatcgatatggcgagtatctcgaatcttttggagcccgttttgctcgatgatgttttgatcttgccggggtattcgttcgctgcgtcgtcgaattcttacagcaatgtgaatgtgactggtccttcattggtccagcatcattatgccggcagttggaagaatcacaatggtggtgagatctgaccatggatatgacttcatgtacattggattttgtatagagccatgtgatttataaggcagttgggtcttagaccgttagaagagttcacgaaatttcatgtaattattttcccattttttgaacagctagatttatcagcactatggtagtacacgaggcacagatttcccaggattccaccggacagttccgtgaagaagaacgatatcgtcagtcataaggtatcgggaactttttgtgagaaaaaaaaaaaagttgaagagaaaagatcaaatcgcaaatattggtggaaatcccggacgccacgctgaagtaacaaaaaatcgaacgaaacatggagtcctgattcgaggaagatagatagtgtcaaattcactcctcgtcggtctcggtggcatcctcgccgtcttcatcatcggactcgtcaactccgctgtctgactcgtttcccccgtcgagacctggaataccgcgccactcgacgtagtcaccttccaaccagcgacggctacggggaagctggtagggatcgaaggggaagtatgcatccagttgatagccgagatgatcgccggcgcggatctcgcggccgacatggttgaagcgaggatctgagagattggaaatgctcctgaaggcagtaacgcgaatgcgcttgttggtctcaaggagagggtagacgtataggaattggaagtggtgggcgatacgggcgaattcggcgacgatggccggcgagcataccttgagcgggttcaatcgcgaatagatgcatttgtgaaggaattctttgatgttgggaggaaatgcgatctggcccggctcaagctcgtccacctgagccgcagtatcaccatcgacggcagcggtagtcagatcgcgccaccggaaacagaaaatgtacagcagagcctgggcggtggagtagaaaggtccgtagcgacgaagatcgggcccgcggcagctgtcctcatagtccatacgtaggctgttgaggtgtgtgaggaggagatcgaagacgtcgcgaacaacttctcccgagatatgggcaccacgggcaacaaagctggccaggtatgcggctgctgactggcgcaggatattgggctgcagcttgttgaagatgagctgtacaaatgtggctgcgaagcgatccacgagcacgggcgaagcctgggagaaatggaacaagaggaattgcgagtgacgggatcggtatgtagggaggatgatcgtctggaagtgactgaggagcaggtctagcgcattctccttatcatccagggtgcccgaggtgaacgggggtgagaagtattcgaagaggatgtcaatcatcccgtccactttgagaatgttatccttgatcttcttaggccccttcatgtcgtcctcttccgaatcttcgctggaaaccgaggcatcatcatcgtcatccgaatcatcaatctcatgcaaaaattcatcgccgacttcctcttcaaagtcctccatatcaacctgaatttcaacgtcgaccttgacaagcttctcggtaataagcgccaggatgtcggactgaagctctggggcgtaagtaatgatgtggatgagattgcgggtataggcaatgttcgcgctagctgggtctgtgtcgaagggaaactgggcagacaaaatcggggagagtgacccactaccggccgggatgagccgcagcacatggcgcattgccatgtggactcgagtatgcatttcggatggtgtcacgacagcgtagccagggagtcgaccgcgtcttcgagggatggacccgagatttgtggctaacatcttcaagacgggaccaaggaaggtaccctgtgcggcggcaaggttgcccaggaaccggatatacagcttcacgtaggattcgtcccgtccgagccactcgctgttgatgatggcatggaccagtccgctgcaggagcggtccaaggaggcaacatgcgagatcagaccaagaaggtggtttttcaaagatgtgtgtgttggtgattcatatgcaagcaggctgtcatcgtcttgctttgttggatcggcagaaaacattcccttgattcggtcgtagccctcgctttctgacatcgtaacatgtcggtggatagcccggcgcatctcctctcgaatgaatgtcagactcttctccgacgatgtatcctcatatatcttcacatcttgatcgaactgtacgcggggtcgcttcttggtaggaggaagggcttctgtcgcgtcatcggcctgggatgaggacggggatagggggaggtccatctcgctaattttgcgtttcgagccggcgaccacaggaggagccttcgagtttttgagaatcgggactggagaagaagccggaagcattttagatcgagatatcgtgggtgtggccagtagcgccggtttgcgtgaagtcgtggctagggagaccatggccgaaggtgcggaagaagagatgtaggacaggttctaggcagaaaccggtgtcgacatttgcttttctgcactctggcagaaatcgaatccagttgactttcaattcaacggagcttatcgaagactgatccaagcacacgacacttttcacgtcgagatcttgaggattatgctacagattggaataggagaaaaaggcaacagtctgtctgcatccgtgggagtccagttgtttgagatagataaaatcggatgcagacagaatggtcgagttgctggattccaagcaaagcaaagtgaaatttttccttttccttcggtcacttgtggagcccggcggacacccgtgaccgtgtcggtgagccctacgctatacctaattgggtaatattgacttatgtcatcatgtactcattgtcgggatgtagaactacatcgtcacatcttactttgttcgacttggaaggtagttttgaacgtgtttattggatcatatttgagattcggaacgagacatcacataagactcccaaaaagtccctgaaagaccgcagaaccatcatcaagtacggtatgaagcagttgaacccaaatgatacatcaatgcataacgataaaaagaccgtctaatacgggaagaagtaaaaaaatggcatgaatcaattcaaaaaatcaagattgagcgcaggaacacaaggtcctcccatggtatcgtgtaaaacaaggggcaatagtcgtaaaagaaagaataagagttggtcgtcttggcgggtcaagcgaaggaatatccagtcccttgcaagtccgcaatctcgtgtcgttgatcaccccggatcaaccgggggcgcagcaattacgttagaaccaagatgtggtcataggcccacgtgtgtcctcgaaaatgctgccgtacagttcttcaacttccacaagataatcttcgacggagaacttcttgagccccttggcatagaggatccgctcctcgtcatcgtgcatattaaggccacaaaaatcctctacgacctcgttcacctgctctagctctttgccgaatggatgcggctcggcctggaagaattcctgtgatgcacgaatggtcggtgtggtgcgcgctgcattcagcggcggcggggacatcctcgagactgagcgcttgtgagcgagctcctggtgtgaccgcttggtgtgggacagagctcgcttaggcaccatcggagcatctgtatttgacgaagacgtggaggagcgcgggtggcttgtcaccgaggccgtatgcttcgggaaatacgacgccaatgggtttgcatcaatgggagagctcccatgaggggagacatcgggcgaggacaccgaagacgcgtagctttgcggagaaaatgcgttgtcggagtcgtcgcgcgatcctagtgacgaagcagatgaagagccggcagagtaacctgggctgatatcgggtgcgttgtaggccagcatgttggtcgtagacaagagctgcaccggtccagatatgttgctgcgctttatacttgccgagttgagtcgcagattcccttcgccacgatacggcatgggtgcagacacctctgggcgcttattgcgccgggtgaatgctctcgtgagggttgacatgatttgtaaatttggtcaagtttaaaatatggcaacggtgcgtttcagcgtggttgtaaattgatttagaattttacacatgcaatgtgtgcgacttcgttcgtttttggagtctggtcgctctttgcgatcggatgcgttgagtctcgcgtggtgagacgatcgcggaaagaatgtcagatcaactggaatgtccagtatcagatcgaagtgtgtgtagaatttcgaattctagttcacagtagaaaatgaatgtcgggtcctcttgatttcgcacagcaaaatgtagagaataacagccttaaggaatgtgtttgaaataaaaaaatcaaaggagtccaggatctcagatcgctttgtatctaggacttaaagaataaaagaataaggagagaatgaaggaacaaggacacaatcccaaggaggttggaagaagaaagagagggggtttcctccttacgggggattatgggcgctacaccagcgtttgaccaaatttcacctggaccagtcgcaggacacccaaaggatgctgatggagcccaatcaaagagttcggtctagaatatttggcttctcagggcccagttgttcttgacgatcagactggttcatccagacttttgatcgtttgcctcattctacggtatacgaactacgcctaatattggttgaccttgaagggggcactccgtacaggtacttccgaacccccgagttggttccagccccatcttccagggctatcttccagggtcggatatgtgcctgggtatggagggcgtacgtgttcaacgtgttcgtgttcgacgtgtccacgggtcctgtgctggccctgagttgatatgaacaacctccctagagcatgacacatacagcgggatgcgacaatatcccgagaataatataattgaaacggatgcaggtccgaattcttagtctgaaggcacgggcgtttcaccaaccacttgtatcagttctatgctcaaagaagtctgtgctccgtgacccatttggcttgaatttggcccggtagacgtccaatcagaggggttggctggatgaactcaggtcaaggggtcttagtgcagcgcttgcctgcagctgaccgagtccggagggtttggagaacttccaaatcacagagatggtgtgctcgttctctaagtgactggtggatgtggagtattggtgtttaaagtccttcatctcagactccaccgtgaaaaatgtgtggagtggagtgagccccgctagggccttatcatgtcatatggtatgcgaggtactgcatgtcgtgtagtgctgtgaaccttggaattgcgccttgatcatgtattgctttcactcgacaaggccattctggtattttgcgtccttgaaaggttccaaacaacacgtgatgtggtgacacacaaccatagctccgcaatcgcttggcccgttacagataagccgctcaggctctataaggaaggagcagaagcttcaatagtattgtgttgcgtttagaacacatcaatttaaaagtaaagtctcgggttattgtgtgacagctcctccgctttgctcgaccctgcagatgcattggcatccaccgagatacccacagcatcctcgacgctagttattccgtctcgggaactacctggagatggcattattgattcaggccccaccgcgacttggtctccaaaatatgcctgcgaagctatcaccccagggtggggctgatgagcatcgtacgaactcaccgaactgaccctgttgtccttttgccatgcgtatgaaactagtccggaatgaggctgatctcccgagggctgtgatttatcatggctaggagtcataggaaccgcgtagccacgtcccggtgtgtctgaaacgacgtcacttgattgctcaatggtaaaacggtccgacatgaccgtcagccaacgctccatatcgggcgattctcggaggggaagctgagaccactctttcatgcgagctgccttgtgcttgagcaaagtatccgtctttggggtttgaatcactattggttgccccattgaacgcatggccatcaaagctccgtaaagggccgactcggtctctgccagcctctcttccaattggttcaagtatcccaacggtaagcccctgggccaatgagttagcttcccgggtacctgcatacatgtaggccgggtacttgccttttaccactctcagggtagatgcatttcgatacatctcctgcgcattgggaacagaacggacttaacgagatacaagtaattagaaatgagactggctagagaactaaacggtgagagctttggtcttacagtttgcggtcacactatatggtcagcacttatcttgctgtactttatgaataacatactttgcatttgcgctgtctgcatagctcacaggaaatcggattcaagttctcttctgatgagatctagagtcagtcgatctatgcttcttatctggggtattccggtcacacctggcatggtggcatcaggggccttccgcttcgatcgcaattgcgccatttgttaatcccgggattatgcaatgcccatgtagagcccccgaacatactaatgcaagatcaggctatcaaggtcgggtgtactccgtatgtatgttgctgttgggtgaaagtctcggagtaagaaacctccgggtaggattagcaggcacgtgatgatcaccatattcatcaggaagacaactaatacaacagttgttaaggggcgtgcggagcattgattttgcttctgttttgaatgaacgaattctatcatcgtgttgttcaaaatccctgcaaattggtcgtcataacgcatccgattgttggtcttattgacttgattattccatcccttccttttttattgcaatttattaccagccttccttcagtctcttggctacctaaatatggcttgatgcataatttttttctcattctgtctcacgataagcttagcttgctcaaatgcatacgcacaggcaagaattcttcgctaagcctgcgtccagtaagggtaatgccatatctattgccaataccagtaaacagatactcggtatgttaaaggcagcttacagaatattggtggctttcatgaccattcccttaaatttcctgacgatttcacgatcagcagagaacccaagtggtacctggatgccttgtagtcttccaaggtcaaggggaaggtccgtggaagaagttacgagaagaacatcacaactatagttttgtgaaagacgcgtgttgccatggcctaggtgctccattcgtgccttcaaggagaggaattcctcagatctagacgtcccttgtgcatcacgcgcatagtgcactcataattgagaatgtagctttaaattgttcgactcgtaggagtgagatagcactatctagggtgtatcctctgtgctcgataggggatggcgatgaagcagttaatataaaaaaaatattgttcaatcaatcttcaattcttcgattttatagatctggtgcagcccgctgctgacgtaataacgaactgggcgccagccctggagacttctcccaaaacttgacttcaatatctcatccaaaaaatgtgatacacaaactacagcaataatggcttcggcttcacctgcgagtatgagattcgaggacaatgaggctgaatggccatatttttctcgtgcaactaagagacacaagcgcacatcaggcgcgggtacctcagggccctcgcctcgcgagattggatttatgagagaatctcaaaatgacggatctgcgaccttccttggaagctcaagtggaatccattttatccgccatgtctacaatgccttcgcacgtcgttcagcggacttggaccaaacgcgagcccgtgacaaaacctcggtgccaggggaagacgaccggctacagcaaaatccaggaagcattcagagctcggatgagctgtgggcgatagaagaattaaattttgtgcccaatgcctcattttctttcgacgatcttgtcatgtggacacgcagctatttcgaaaattggcatccaatcttcccatgcctccacgccccgactgtcttgaaaactatagagacagtcagtcaaaaaggagcggagtcggtcaaccgattggaattgatgattctccgctccatcgtatccatttctctgggtgacaatcgacagagaacgtcgtctgaatcgaagcttagccccgttccttcggtcttggtctttcgatccattcaacatgtgatgcaagatgtacaaagcctccttgaagagccgactagcttgccactgctacaagctgcatttaccgctcaacttgcacttgcttctcttttgcgcctgaatgccgcctcgcgggtggggggtgtcatcacccgcactgcattccacctcgggttgcatcgttgcccaagacgcttttcttgctttaccagcgaagaagctgatattcgttgtcgattgttctggtccatctattcccttgaaagatatctttctcaggcccttggcattccgctctctattcgagatgacgacatcgacgtgtgctatcccgatgccgaaagacattcttcaacaactgtcaagctcccagatggccacagactgcggttgttgtgccaccttgcgagattcgcacggattcgaggtttgattgttgaacttcgtaataaatccattctccatagtcatgctagccaggtcgaagcggctcatgttactggagagctagcacaatggtggaatgaagtttatgatgatgtcaatcccatcaatgagcccgcagaatttctagagcaagagccgatcttgcagccatatcatcggctactcctgatgatcctaagacacgaagctgtcatttcgctgaaccgacctcttttagcctctgaaaagcccagtgcagattacaagaacgctttgcagacttgcattggatcctctcggtctatacttgcggcattgagaaagcacatgtcttttgaacccaaatctccgctctcgtggccatgctttacatggtcgacttggatggcctgtcttattctgatgtatgctgcgtgggaagaggaattatctacgccgactgctctcaaatatgcgagaatggggattgccatcttggaaaacctatcattgcgcggtagcagctggccggagacctgcatcgaggcgatcaagggtatggaatctgcttttgagacacaaacaaatggtggtcaatccgccaaggctgctgccaccttgaacggcgccgagagaccaactcaaccctgtgcccaagccacgtcatcgatggatgaacagatagcaacgccgccggttcgggatggaaataatgaggttggcgatacagatctcacgccagttcgacctcaagctttagcaccgaatggataccaaggccgttcagtctctaccggaattcatccgtttcaaccatcaattcgctcacctgtccagagacttgacactgcagaaaactacgactctactgttttctcacagtctgacaatatcggtaaccttgccggagggttagaccctgctgagaacgatttcaacggacaatattcagctggtctcattttcggcaacatggctgacggaaaccctgctttcaatccgagttttgctggtcaagactctttgccattttcatcatctatgcttttgaacgatttatggagtgtggccgatggcccatggatgattcacaataactttttgtgatttccgatattttcataagcgagcatatgcgtagatctcgtaccttagggcaatttcaatgtgattaaggattgaaatttgtttcgagcaatgaatctggaggccatctacaggccatctctcgaccaagttgttcgtcaagcggacatgtctttctccgagtggggccgtatagcacatcccggacattcgcatctccgtccgcaccccgcgacaattatagtcgaatgagctcgcgatgaggggctacgcgataggtttatgggcagtttgcaggtggagactgaaatccgggaatttggtgccgacttcctttaaaggcttcgtcttctgccgtttatcacctaaatcacctccaacaagaacttatttatcataacatcatgtctccaccagtcgctagtcaaaagacctacagcatcgcatccatcccagccgatggaattggcccagaggttatcagtgctggtatcacagctctgaatgccttgaccgatactctcaagacgttcaagttggagttcaagaactatgattggagctccgagacgtacaagaagaccggcaaatacatccccgatggtggactcgaggagctcaagaagcacgacgcgattttcttcggcgccgtcggcgctcctggtaagcagacacaatcaatgccttggagacattatactaaacaccagagaagacgtcccggatcatatttccttgtgggggctgagactcgccatctgccagccgttccagcagtatgcgaacgtgcgcccaacacgggtattccgcggcaccgagtctccgttgcgcaagtgcgggcccaatgaccttgactgggtgatcatccgtgagaacagcgagggagagtatgcgggccagggtggccgttctcacaccggaaaaccgtgggaggtcgcgactgaagtttctatcttctcccgtcacggtgtggagaggattatgcggtttgcctttgagactgctcagaagcggccgcgcaagctgttgacggtggtcactaagagcaatgcccagcgcaacggtatggttctctgggatgaagtggcaaagattgttgcggttgatttccccgatgtcactgtggacaagatgcttgttgatgctatgactactcgcatggttctgaagcccgagagtctggataccatcgttgctaccaatttggtgagttgccgatatagaatgaggcatcaataggtctgtggactaacgatcaactagcacgctgatatcctctctgatctcgctgcctctctggctggatctattggtatcgcacctacctctaacctcgatcctacacgggagtatcctagtatgttcgagcccattcacggctccgcttttgatatcactggcatgggtatctccaaccccgtggctacgttctggacggcttcggagatgcttgcttggctcggcgaggaggaggctgctaagcagctgctggtctgtgtcgaaaatgtctgcgagcagggagttcttacccgtgatttgggtggtgacgccacgacgaagcaggtcactgatgcagttgtggcggagattaagaagcttgcggctcaataagtcgtgtccaatcacgaaattttgtttggggatgagcaatgaaattgtatagttgaataaaatgagtgggcaatacattgagacctagaagcggctacaatgatgaaaatggaaaatgcagaatgaggtgaaagattcaattcctataaaatgccttttgtatatataccccgtaacatttaagaggatacctcgcacttccgtgtatcctacaagggaaaccttcgatatatataatttgagtgtttgttgtgatcaccgatctcgaccgccttttaacctccatcaactcaaccatcactctcatagaaacatttgaatggagcacccgtccaaaagagccaaaatcttatcagattccgatgatggctcagcgagtacagccttgacgtctttgcaaaggaccattagcccaccattgccacgaggctgccccgaactgactgatgggaaattgacttctgacactggagacactggaggcactgctcgccctcccaagttggtcaattcgccagtacaacttacccatattcgagatctaccggatggtaacaatgtcgacaccatccgactacgtgatattctcggagatcccatgattcgcgaatgctggcagttcaattacctctttgatgtggattttctcatgtcgcagctcgacgaggatgtccgcagtctggtgcaagtcaaggttgtgcatggatagtggcgaagggaggatacgaatcggattcgaattgaagtaagtttgcactgacgtgacttgatcgggttggctttgtcttttgaatacgtctcaccattgatcgagggtttgaagtgacgactaatctgcttctaggaggcctgttcgcgatatcctaatgttgagcctattgtggcctacatgccggagcctttcgggacacatcattccaagatgatgattcttcttcggcatgatgacctagctcagtaagattcttgcatacatttttgatcgctatagcccgatataggtctgactgaattaccaaacagagttatcattcacacggcaaacatgatccatatggattggactaatatgacacaagccgcctggcgctccccattgcttcccctgcagaagacaagctcagcaggatctcagacagacaccaaaattggctcgggcgcacggttcaaaagggatctcctcacttatctgaaagcgtatggacctaaaaagaccggcccgctggtccagcagttggatagctacgacttcggctctattcgcgccgccctcattgctagtgttccgtccaaaaagcacgtcagtgactccagctcagaagaggatacactatggggctggcctgctctgaaagacttaatgagccagatacccatccagcagaaaaacacaggcaagaaaccacacatagtaatccaggtgcgtatctccacaaaatcatcatgctgtaataaatctccaacatatccaagatctcttcagtagcaaccctcggccaaacaaaaaaatggctcaaagacgtgttcttcaaagccctcaccccaacccaaacccccaaaccaacaacctactcaataatcttcccaaccccagacgaaatccgccgctccttagacggttacaactccggcggctcaatccacatgaaaacccaaagcgcaacacaacaaaagcaactccaatacatgcgtccgcatctctgccaatgggcaggtgacaccctcgccccaggccaatgcgtcgatctatccgaagacaatcccccaacgcgcgaagcaggccgcgcccgcgcagccccgcacatcaagacttacatccgctttggggactcggacatgaagaccatcgactgggcgatggtgtcatcggcgaatctgtctacgcaggcgtggggcgcggcgacgaatgcgagtggcgaggtgcgcatttgtagctgggagattggcgttgttatttggccggatcttttccgagatgggggttgtggcgatgctgcatctgcatctgaatcccgagcggaagagaaatccccgatgccagacacgctgatggttccttgctttaggcgagattgtccttctgtgtctgagggcgccgagacggcttcggtggtcgtcgggttccggatgccttatgatctgccattgacgccgtatggtgcgggtgatgagccgtggtgcgcgactgcttcgcatgctctaccggactggcgaggggagagttggattgcttgagtccgctgtctttgcatttagtcttcttagctatattttggtgcattttcgtctcagcagttcacgggtgtgaggcgcatggttgtcgtagtatacagtgggcgggattgtgaggtactgatactgagtcatggaaagtagcatgcatttgtattcgtattcgtcctgaaaggtttgagacaatacgattatcttttctctttagataaccgtctttccaaattcactccacaacatatctccgatagatcgcgagtcattgtcccagactaattcttccaattgtatcatctattcgtcgcgggtgccgtacttggaaatgagggtgttgacgtggctgatgtagagttggtgggccttagcagggctgtaatccttgaccttctcccaagcaccgtagagctgcttcttctataaggttgcaaagagtgaattgtcagctattggccttctcccaaacgtgctatagtccggggcttcccgagctcaatcaaaagcagagcttagacgtacctggatatcgaacatgccaggcttctccataacgtcacccttgccaaccttgaagtagatatagaggtccttcttctccagaagaccgggggaggtcttcagcatcataacagccttggcggcgaactcgaaggccttgcggagggtctcggcctcggcggcatcatcgagcttctcgaactcgccttggtcggcgaccttctcgtagacttccttcagggctgcgatgtcgatgccggcggcagcttcttggacctcgggggtgaacttttctttcttctgggcagcctccagggcggtgatgaagggggtgatgtcggacattttgggtttgaggattgtttgtttttgggtataaggaggggtaaagtcaggaacagaggatttatatggttgggatgttggagatggttgagggcggggtcaacggccctggaggtggggtggatgacacactcgccagttgattttgaggtcatacgacctcttgcatacaatgcctttactattacgtaggctatggaatgagaaggatagctttagagtaatccaggtttgtcttaacatattcaacatttggttcagaaattccattattgaccacgccgacagatgcatatccacaatgcaaccgctgtggaatcattcgctatgcaccagaaaaagataacaaaagagaaatgtccgggcaatgtacaagttcaaagatgaagagcgatcaccaatccaccgcccatccattgtgggtgaggaattcctcacaaactgccttgagggcatagttgttccgcagatcattgacactgataggagcccgagtcaaaggatcgacgcccgacttctcgacatacttggtgatgcccaagcgatcgaaactgaccccggacggtgtaatgacaggatcatgcatgatctcaaatgtgatgccatcaatgagatagtccggaacaacctggaagcaaacccaaacgtcaacaaccacctcatcgaagaaccaagttcaaaacctaccctttcctgaacctctcccttggaagcaactcgaaatgcctccctcaaatgcctaactttagtctccgcatcctcccgcagcgccttctggtcctccccgaacccaatctccccgatctccccgcgctccaagcgaccctgcaactccgccagcgcccgcgtcacatcggcctcaatgagcgcctccatagaacccagtgtctcattcagctggcgcacccgggaagtctcccgcgcagcccagatctgctgcttcgcgcgcaggaccgtctgcgacagattctctgattgggcattcttcgctgctagactctgttggtaagcttcggacgcgacgtcgagtgcttcttgtgggcgctggaggcctaggagtgcctgtgcgaggtagtagtagctcttgagcgcgacggggttcttgagaccgtagatctcgattgcggctcgcgcgtcatgttcaacgtcggcccatttggcaagtttgcttcgtgttatcgcgcggtttgtgaagaaggttgggtcactggggttcttttggattctgtttaatgaggggattttgttagtttggggacatttgaatgatcgttgggtttgcgactttggttgggagtgaggggaagtgttggaggggttaaatgtgatagcttacgcctgggagtacaagtcttcggcaccgctgtaatccccagatttgtagagctcattgccctttgctttgagttcttgggccatgatctatgtgtgagtgaggccttgagtttctccccgtgtgatctgttccccaatgtggggcggtccccatataaattcaagagtgatcggagtggatattgctgtgattcatgacagctgggggatttaaagggtcttggatctgcagtaactatgtaagtacccttttgaatatctttgtgagttcacccaaagcgcatgaaacaactgtcactatagttggttatggtctatggaaagtcatagatccccgcagaaggtctgagtcagctcaattgatgcactgcgccacatgaggtagctactattctatacgttaatctggatgaggttgactatacttattcattcactatatacatatctctgtgaccttctaatctgatttggaagcagaagtaacattcggttcgtggtatcatacgctgtgagaactaagaaagacacaacaatcctgcagacaagtcagtgcaatctgacaagtcatgctttgtcaaagatggcacaagactagaaggattcccaagacatccggagtgtttcgggtatcaggtaagacgagacaaacagcaaagacgtgtctaagcagcagtatggaactggatctcatagtccgtgatagcttggaccttggcagcagaggcggacttagggtcgaagcggtagtttagccagtcggtagccagcttcttggctaattcaacaccgatgacacgctgtcccatgcataggacttgagcgtcgttgctcaggatggagcgctcaacggagaaaggatcgtgggcagtcacagcccgaatgccgggcaccttgttcgcggcgatggcaacacccagaccagttccgcaaatgaagaggccacgatcagccttgccatccatgatgagcttggcaccctcgacggcagggtgtgggtaggcagtcttgtcggaggatgagttgacacccacatcaatgatctcggcgacgagagggttcttctcgagagtggccttgatagcatccttatatgggacaccggcctcatcgcaggccatgacgatgcggaaaggagtagacatgatgaggaccgaggtatggacgagaggatgaagaatgtacaaacaatacgagatgtattgaatcaaatatatggtagagataaatagattgatttcacacagaaaagaaatccttgacttgggagtacaacaaggggtctttatatctttttgcttagctctcttcccctctctcctttatagccgtacaaccaccgctcaggtccagccaatccttgcatttgatagaatcacctacagccgttctccaccaagagactcgaatagtctggttccggccttgatattgttacgcgtatttcagcgtccagggtggcccgccccagcatcatagcaccccacgacgggccgtgagtggtcggtgccagaaagaggttaaaccgaggtcggatactttaggatccttgttttggtccgtacatgcgtcttacctcgtattaccggcatgttttattagacctcgctggcgctggcttggaacacacaggcttcacattctgccacacaccaagccatcgatgttagtggtgagcgcaacctacaatacacgactgacaagaaggttgtggcttttcgcacaggcatggcggtccaactggcttcttaaatgctgatgcctcaaggccgagggccgggacctttggtttcatcttttcccgagtccagggttattttggtggctaaggtctgggcacctcgtatatcgacgaatacatggctatggccccggccgatgtcacctagacgggaagaggggaatattgaattgacctcataccagggaattaggttcaatgctttgaaaacctggctgagcatgacattggagggtaatgcgggatatcgacgagtgaatttgcctcctgacttagtcttccaatggtcgaatgcacaagtacacaagtacggccttattatccccaagacgctaaaccccataattgatgtgcattgcctcatagcaaaggtgttttactccactttaccactccactgcaatgttgttggtcgttagcccaccggttctccggcttgtactattgtacaatgtatgttctccggattttcgtttggatctgcactgtatgatcctagaacttgcatcctaattatactatagtaggcagatgggatgaaggagtcttggtatgtatgtctaaagtgtacatacgtccaaagcgcaataccatctgggaatagtttgattctcctatgtccggggtacggggtactagatattacgttggcttcgcttggcctatcacagtctagccaacaattattggattcggtattgagtactctattgagtactctgaatggctatagcccgggcccatgtgacatcacgcactccgtaccctcatacaacataacgtgtactccgtatggacaatcggaacgtctagcgcataaatgccactaatgcgcattgacacactggaaattacctttgatcaaataaatacttggaaatacttggaattacaattcgaaccctggctttgactttccaactttccgagaatcaagaatccctagcctcagacgggaacggtcccccctccataacacccaaacacacaactttcgcaacaccaatcaccatggcgtccacttacccagttctcccggagaagctcctcctcatctctctaaagatgtacttcaccccagaccgcacactcacctaccttcgcgaactcctcaacccaaccaacaagatcgtccaccccgcaaaccgagacaaactcctcctagctctaatcccagacttcctaaccatctggccctgcgcgcaaatcctcaaagagtacgaagccaacctcaccagcaccggaaccggaacctccccatccccaccccccttcctcctcggcgcgcaagactgcttctgggaatcgcaaggcgcatacacaggcgaagtctctccggcctcaatccgcgcgctaggctgctcaatcgtcgaactaggccacgccgagcgccgcgccatcttcaacgaaacagaagaccaaaccgcccgcaaagcagccgcaacctgcgcccagcacatggtcccgctcgtctgcatcggcgaagtgacagctcccggccccgtcgcctcccaagccgtcggccaggctgtggccgagtgtgcggtgctggtgcgcactgtgctggcggccatcccggacgacgcgcccgttatatttgcttacgagcctgtttgggctattggccagccgaagccggcgggtgttgatcacgttgctgctgttgtgcagggcatccgggcggttattagtgcccggtctggtacagtgcgtgttttgtatggcggtagtgccggacctggtctttggggggctggtgggcttggtcgcgcggttgatgggatgtttttgggcaggttcgcgcatcaaattgatggcgtgcgggaggttgtccgtgaggtagaggagacgctggctatagcgtgatgatgccccaggtactcatcctcgacacgacgccttgacatttcatgtctacaattatacaggtatacggtatcgtgtttcgcactatacggttccttgtcattgttatacggaataataaataacagaccttgaagaaaaaggcgcatctagacaaaaacaggtaaagtgggaatctcaaccggctgtctccccgggaagcctatctggggaaacccgcaaactggagaacttccccggttttcttcagtcacggggccgatcagagatttccctctcagatgactttaaagctttttttaggttcggcaaacctcaataggccttggatactatgtatctctcctccactctgctttatgtgggttcattggactgatcgagtaatccgagctattgatgtagttcgcgcgggtcaattccgagcgagatcgagttccccttttcatttatttcggtattgcctgacttggtcgttccatatagaattttgcggtgtcaattggatctttcgggcgagaaatcagaaaaaatgaatgcagaatattacttttcttgtgcatatccgtgttatttacaggatctatcaaagaccgaatgagaataatcgaaaaaaaatcatagttcacaccgcttatttcttctgcagctcctcgcgcagctcctgcttgacacgcgtgacagtgccaacaccgccgtagacaataccagtgtacatcatagccaccgaagcgccggccttgagagcctcgcgtgcctcctcaccagtagtgataccgccggaagcgaagataaccttccgaggaaggccagacaccttcccgacagacttatccgaatcggtcgcagatgatgggggtccctggtcaagcagggcgcggtagcgggcgacgagcgcaatggagcggttaaacagctgggggccggagtaaccgccggtttccttcagagtcttctgctcctcggcggggaggacgaagccccggggcacggggtcgggccgacggttggtggtgttgccgacgatgacaccgtcgacgccggagttccagacagcctcgcagatgccggatatctgctcgtcggagtcttcatccgggcttaccttgaccattacgtagggcttggtcttgcgctcgacgttcttggcggaggcgacgaccgccgtgaggattgctgtgaggggtgcggctgcttggaggtcacgcagacctggggtgttggggctggagacgttcacgacgagaatgtcggcgtacggcgccactcggtccacgcagtaaacgtagtcgcgcttgatggcttcgatgtctccgtcgggggtaaccttgttcttggcaacttgcaccgcaagaagtttgcctgggaccagacttccgggcggaacgttggcttcgccgtccaagacgcgctgcgcggattgttcgtgcaggccaaatccggcggcgtaggcgaagtcagctacacgctgcttcagaacctttgccatatggtcggcgcccttggagttgaggccgtagcggttgatcatcgcgtgttgcgagggcagtcggaatactctaggcttcgggttgccttcctgtggtagaggggtcgtgccgcccacctcgacgatggcaggaccaatgtcgaacagcgcatcagggacctcggcgtgcttgtccagaccggcggagataccgatggggttagagagggtgtatccaaagacctggtaaaagacctcgtcagtgattgaccatcggcaggtttgggaataccattacctcagttgccaggacaccatcactgtccgggtcgccacgctcgcgtgggtgcagaccatattggtagagcatcttcaggttttccacgccaacgtggtgcgcatcctccgcatcgggccacaaaaggcggatcaagggtacaacgccgtatctgtggatactggctctggtgtccgttccatagatgtagcccaccagcagggttaaggccaatgaggcaccgtacaaagccttcctagagccacggcgggctttgcgggggatctccttagcggcctcctgcgtaacttcctttcccatctccttggccgcctcagtgggtggaggtgcagccgagtccgaagcatatcgcaaagcaccggggtagcgctgggcccgtttcggtagcaatgccgacggccgttggatcaagcgggaggtagggagagcgcgagcccggacgctggctctccaggccattgttgcagagttacaagtcattttggttgcgtatagagctaattatcttcgccggagcaacgcccgatcgaacctatacagcggttagtacttgcgattgatagtggattgtggatagagctagtcaagctctaatcgacccgcattgtaaactagccggctggaacagtacgtacagataaatatgcacctaataaagcacttacaatttcaattgagcacgatccgaggttctcgcttgcagggcggattcgggttctttgctgcacagtccgggcggtgtcaataggtcctgcagaattttgagggcggtaccattacgtagcttcatcgctggatgtacttcgtcttctatgtcttcggttataatttcaataattgttagagattacaagatgcttcgaaatattttcttatccctatatttagagcaatgtctatgctttatatgcagaatgagtgaatatattaactgacgatcttcccttcaatgatcacgaggacctcgtatcgggcaacagtgctaaggcttgggaatgaccaacctaacttctgcatctcaaatgttgcgaatcctttagcttgtctctttctccgaacagaaacccttcgttcatatccacggtgctgcatgccacctgtcccagccaaaatgaggatccaaggaagaacaaccaactctccagcggggggatctggccgtgtctatttcgacgaggaggacgattcccctggtcgagaacatgcaccctcgcagcgggagtcgaatactatccccgaagcgactcctcagctcaatcttacaaaggagccctaccgttcattcaacgtcttcaaagatgtatgttagcattccggtatggatgcagctgtctctatataatccatcataattcaaacaattctcatcaattcgcacaggtaccactcggtacaaatgccttcagcttttgccttcaggtccacccttctggaggacttgctcaatctccaagcccagtatatcacaccttgcgcatcccctggtaccgccaagggctttatctgccagcttcatttgatctttactctggtggcaatgttgtgcgcagccggaaagatccatctcctgatcctaaggaccaccgtgcgcacattcactaccgtggctttgagggtctgctcggtcttcacgtgacagtagacatcttccgccaagtaggctctaacacactccaaaacgacctcccagcctctgaggagagactggatcttgtcaagcactgctcagtggatattgttcggaagggaattggtaggacttaccgtgttgagattactggtggcggcgctgtcagaacattctactggaaaggatccaagactgcattgtctctccttcaaactgaagagaaagacgctggtcctagcgatgggaacggcaacctgaagttcttcgctgcaaataaaccagatgatattcttgcggtgtggcagaatagaaccgatcggcaaattctagggtctttgaacgttatcgccgagcttgatgctgattcggatgggatccttgaagggtcaatggtgagttgcctggcagtggttgttgcagaaagggtttccgggcgagggtggataggtggcctggggaagtcaaggaactcttagaaaattgttatttattgggataagtgtatctccatgtagtgaagacctaaataaaggcctaaaactcgatcaccttgtaattagcaaacaatgaacttaggtatgctgagatatcatgcgtttataaacttccatttccttgagtttcttcattctgtcaaagctatttttgttagcctctctaattaccatgtcgatccaacgaatacgctgtatttaagtagaagtgataatatgttcttcactgtcaagacagatattttagaacatcaacatatgccagcccaaagtgagctatgataccccgtacctattgggggattctcaagaccaccctgccatcaatctccgagcgctccagacggtccaaaacctcattgatatcgtccaagttgaagatgtcaatatgcgcctttacatcgccggctacggccatagccagcatctcatccatctcatccgctgttcctgcagagtttccgacaatagtaaggcctgtattaattggtcagaccggctcatgtcttgagttgcataggtattgagaactcacccttgacaatcatatcgaatggcgtagctggcagtttgaatggtttgttgggaataccaacgcagaccagcgtaccaaaaggacgcaacatctgcatactttgttcgtatgctcgctcgccattggcagtacagatcacagcatgtacaccgaatgtcgtcttgtctttgactgcctggacaatgtcgatatcgcggtagtccaggaattctgtagccccaagcgaaaggcacagttgcttcttcttatctccgctttggaagcatcgggttagcttgttgtaaatatgacacataatgttaagttgatatcacatacctgtcgattgcaatgaccttgaggcccttcttagcggcaatctgaattcccctgcaagaaatatcctcgtcagaaaaaaaaaacatttcggctatagaaatctgaattgggaatgtacatatgaccaaggccacctccagcaccaaggatggcaaggtagtctcccgggcgagtcttggtcttcatgattgaagagtacatcgcaattccagctggagacaatgattagcgtttgtattagcgaaataccaattggcaaaacattaccacatagaagaggcgcggcagtatctggcgaaagctggtccggaattttcgtcacatgaagtgctgggctgacaatatattctgaggcatggtatcagaagtgccccaatggactgggtgatggcatcgatagatagaatacttacgctggaatgttccaggtacattctgtaaaccaccaatgcaattagtaacagaaccgatggcgaaagacatagtctgtggtgatcagcaacttactgcaccagcattcttctgatacgggcatacggtatggttgacttcacaaatctcgcactggcggcaagaactgtagagccatctaatagtggaaatgcctttagcgtcaatataactccagatgagaaatttgcgacgaaggagacagacctgataccaaccctcgttcccatccattgcttctcgtcaacttccggtccgactaagggtaatgacgaatattagtatacgttctgacctatgatcagagacagtgatagttcttaccttggactactctcccaatgccttcatggcccgcaacatcagtcaacataggcgtgtcaccgcggatgctgtgaagatccgagtgacataccccagaatactcgagcttgacgaggatttcgccttctcccggagttggcaccgggcgattgctcttgatccccacctttgtggagacaggagtacttgtggatgagataacagcagcgatctgaattggggggattggggggaccgacatcttgctgcttctatgaatcttcgagatcgcgtattggagaaagtctgaatctcaacgaggacacttggcttaaatacttcggtagttgaaacctgattccgataggcggcattagtcgtatcgcagatgcgggggcgtgaggaaggcgcaaagataagcagaaacagttagcagatgccaagatatgatattggagatctcgagtttgggcagattaggcaggttagaccgggggtgaaggtggagatgggagatatcaacacaataatccactacaaactcggatagaatacatctgacacttcttttttacagttcagcgtcaataattcaattaaacaattatgtgtaagccgcaagtctgacatcgggacaatcatgaaggaatataagacaaggactccgctaggcagagacgaaggaaagaagtgctacagcactcatgcagcagaaggcttccgagttgcgagaactcgaacaccaaggtatcaaagatgaaattctaaacccgacatagaacgctagaaaatcatgcattctcggactggattgtttgctgcaagtaaagacatagttagtttgagaaacaagcaggttgcatcgggagagaaaccaaccactagccaatccattccctcattaatacccttgccatcaatggcagagcaagcaacaatactccagtttcggtctcgcagctcttccagcttcaaagcctctgagatctcgcctgcgcccttggcaccgggctgatcttgtttgttggcaaacaccagcaatgcagcgtcgtgaagttcctcctcattcaacatggctgctaattcatctgccgcagtccctaatcgctcaatatctgtggagtcgatgacgaagaccactgcggcggtgttggcgtagtagcatcgccagtatgggcggatagaagtttggccaccaagatcctacaatccagggatgttagttatggcccgaacgagcttaaagagggttacaacatacccagacattcagattgagattcttatatgtgaccgattcgacgttgaaaccgattgtaggtatcgtagtgacaacctcaccgatctgtgggcacgaggtgtcagccccgcgaatctcacttgaacgcgccagaaaacccaagtttcaaagctataatatcttaccttgagtctgtacagcaaagtagtctttccagcgttatcctaaatacccgaaagatgttgattagtttcggtccttgtgtcactaatgagatcctgcattccccgcgtgggatgcagatgaggcacaacgtacaagtcctagaatcaggatgcgaatctcttttgtggaccagagtagggaccagatacgtgatagtgaacctcccatcgtgtgtaagattaaccagtgggcgcgttgttcactgttcggtgcacagggtgtccgggcaagtatgggccgagggtggtttaggttgaggggcgcgtaaatggtatagattgagtggaatgagacaaactcgctatggtggtatggtacaagtagttgagatagagatgaaagagaagaaaggcactgatggcagccgcattggatgttcttggccgatgggccagtgcggtgtgggcggtcaatcgggggatcatcgtcttgcgggattgagcttctcatttagaaaaccacattgtgtcttttcctctatcatattctggtcttgcttactttatcgcgttctacgcgactatccctcactatctgaagtgcaaccgggccactacaatcacctccggcgcactccctagatctgccgcgattagtttcaattgaagacagccgaccaccacccgataccaccatggttggaaagaagtcaggcaaggccctccgggatgagggtaagatagtccggtcgagctgttggaatacagccatcaagaacagagcagctgatacttgacataggcctggagcggaccgacaataacatggaactatccagctggccgcagattccggcaatcaatcagaagaactactatacgtacgtatctaggctgatgcctgccgcacggctctatttgataacatcaatactgattgcgctatgtagggactacctgaaacgagacgatcaaaatctcgcgttccgactacaaaacgaggaagcaaggacaaagatgacgaagaaagcgaaggatcacgaccgtgccctggcaatggccaagaccgagaccgagaccgcggaaggcgagggtgaggcagatggcgacgcccaaatggaggatgcggaggagaccccggccgagatggctggctctaaggttattgtcatccacatgggcagtcagaacctccgtattggacttgccagcgacgcactgccgaagaccttgccaatggtgattgcgaggaaatcggcgaccaacgagtccgaagaccatgatgaacctaagcccaagagattcaaacacgacgatggctctgaaatggagcccgaaaaggcctttggacctgaagtatgtccagtacaacttgtcgagatggccttgtactaattttttttgatagtggtcgtctcatttcaatcagatgtctgcggatttaaaggtgcacatgcgacagaacaagcgaagaatgcttccaaactccaaggagatggttgtcaactataaccgcagaaccgtgccagaaattatctctgaacacaatgatccaatgcgtgctgaatggaccgagctctctaatcccccaccagagtatattgtcgggaagccggctctgcgggttccggattcttcgaaacctcgttacaagctgtattggccaatccggaatggctggtgcaacgagaaggactacacaagcaagaggtctctcttcctggatatttcattgatcgtggaggatgcgatcaagaatcaactgcgcttgacgagcaagaaggattggacccagtattcgtgtgttttcgtcatcccggatctttacgacaagtcttatgttacccaagtcttggatatgttgatgcgagagtttgcgttcgctcgggtgtgtttcatccaagaaagcctggcagccacctttggtgcaggcttcacctcgggatgtgtcgtcgatatcggagcgcagaagacttcaatctgctgtgtggaagaaggcatgtgcatcgagaactctcgagtgaaccttaagtatggcggtcaagacgtgaccgaaacgttcatcaagatgatgctgtacgatcatttcccctatgccgatatcaacctacggcgtagacatgacttccttctggccgaagagctcaaaaagaagatctgcaccatgaacgaagccagcgtttctccacaagtctttgacttccaccttcgtgtggcaggccaggatacgcgaaagtacactttcaaggcttttgacgaggttcttcttgccccaatgggtgtatttgagcctgctatttttgataactttgacaaaatcaccgggagacggaccctgatcgatcgttctgttgacatttatgatggatcacctaatgatcctacttctgcagcccagtcggagattttgaccgccatggcccctccccttccccgcggcaagacgaatggcgagtctcacttggcggtgccggatgttcaggccacaccaagccgcccccacgctttaagcaaactcgagggcacacctcgatcttctgtcgctggttctccaggaccggaaaatataggaacccctcaagcaggagggacaagcacgcccgctgccacagccgctgtagcccaagctccccgccctcctgccgtggaagatcgagatgatattatgcctgtcttcggtctggacaacgctatcctgacctccattgcccacgccgctcgctcagacgagaaaaagatgcgggatttcatcggcggtatcatggtcgtcggtggaggcagcttgactagcgggttccatctcttcttggaagagcgactgcaggctctccgccctggcttctcaaaggagatcatgatcgggacaccgcccagagatctcgatccccaggttgttgtgtggaagggagccagtattttcggcaaactaagcggtacaaacgacagttggatcggaaggttggagtatgatcgacttggtccccggctgatggcgtacaagtgcatgtgggcgtactgagcacttcgggatattcatttatggtattatgagaattcggcgtgggagttgcatgttttgtggtcactttcaaaaggaatttctatattttttctaatacaatggagtactttgaatctcgcaatcgataattagttgacctaaaagaaagagctgtgtagttgtgagctgttgtcctgaggttgggtaaatgcacgcacttatctgcttccaacactttcatctccatgatttatgtcctttcacgtgatatcttctgtatttccacgcgtatattcccacaacgcaataaacagacggtgaatccgggcagaataatggttctcaggctcagctccggggttgctctgtatggcttttgccgattcctccagttccatttttggccagtttggatagccccttctactggcgagccgaaccactggattctgatatattgccaattttgctttctaccgccgtccttgcctttctacaagcccttgactttcctcacggtaggtttgcgaccaattccctcacatccattttgaatcgagctcttatactaactggccactatagagttgcactaccattttcgctcgccaaaatcaaggcgacaacatcctaattcatcctagtccattcaagtccattccagtccattacggtaagcttccgtcccacctagtccatgcggtacgccgagttgctaatgcgcaaaatcacccagccaatcgcgtgaccaaataagacgacagtatgtcttccaaatcaaaggagggtcagtcctcagggggctttcatcaggaatacattgcgtccctccgctatcgcaatgatctccctcccccggacatgccccccaagttccttgacatcccacacgagggcttgaatcgcttcctcacccccgggtttgcctcaaacctggcacgccgtgaggagcctaacattgaagtcgatgccgaaggtggaatgccaattgatctagtcggtattccggggttacatttgggcgacgagagtggtatgtcaatgcagaatcccctatcattgcgttgctgcaactaacatatccaccagctattatggcaccagagaaccctcagcccatggatcccgctgaccttccccttctcatgactattgagcaactccgaaaccctgcccctaggaataccaatgtcagtttcctccgccgtacgcaacatatcggtgtcgaccgcagtggcggagatggatctcgccctgcacctattaaaacacaaccgcgcattgcgaagaaaggaaagcctcctgtggatgacccgaaacatgttaagaagttcattcaaaaaggattcgatatcgcctaccccaagagcaagcacgtcggagaggacactgatagccacatccgtggtcttccacccacaaaggcagaacttgatgcctgggctaatcccgtccaccctgacaacccgaagctgaagccagtcgggttcttccctgtgatgcctgatctggaagggttcccagaccctggtggttaccttcaattcaagtttgataaggcgcctttaacagccgtcggaggcaagcgggataaacgtatggatgttggtattctgacaccagtcgcgcccgagcagcgtatttgccaggagcatgaatccaagctgaatcttcacctcacgaaccctgttctttacgcccacccaggcccagttccttatgactaccaactcttccttccagagaagccacagtctgttaagaacattgacgcaagcatgaacctgtccaacccgaaccgagacagcgaagacctatacaccaatgagagcgccgagggcaccaaattccaccgttatgatcgcattcgcacttacgccaccagtgctcaggtcttcaacaccgatcaaaaggacattgcattgacgctcttcaagcccaaggatggagacaccaggcaactggccgcttactactatccaatctcaggcaaggcccgtctcaagccggagcgcgcccgcacgattgctcaggccggtctcgctcccacttccacccaacaagaagagaccgaggaacggattgaccagatgcaagtagttatgcgtgatcccaacgaggctgaaatctacaagcgtgccttgacccgtctgcgcgtcgatccaaagtttgcaagcaatatgccacccgagcccgttgcccaggaggaggagcaatcgttggataacggggagacagaaaagccagccgatgaggacactcgcatgagcgatgacgaatagtcattcgcagctttctatgatgtattatggatctattttttgaacattgcaatctccaaatttctgcctaggtagtttcccatgggtctggcgtctgagcaatggaaaatggcgttacgtatagtgaatttttttactaaagtagttatacaatcaatcgtctcatacattcgcgaatctagttttgtatatttgtatgtattaggccattcatcccaagcctcaattagtacgtgtcgccttccagtcccgtaagtttacgtcaatgtgatagaataagtcatttctccaagtaatgtactcttcgcgtactaagggaaaaagattagcctctatacaaggtcaggtctaagtgatgaacaaacaaaaggaccagccaagtcttacataatcatgccaaggtgattgctgactaataatacgggcagcctggaggtaactacgctgtacagaagtggccattctagtcctaagttctccccatctaacatgctaaaccgaaaatcctctctttctgaaatgtagtgcagctatatggtggtctgggtttccccactgtagtatgttcataaagtcttatccccccgtggtctcatttacaagatcccgcatagtagggcgtctcgcatatgggaaacaacatcttctcgttgaaaatagacaggggcatgcgaattcaacctggtctcaactatcccctagctaggcttgttcaaaatagcttttcttccgcagcttctttataataccactgactttattccagccttcagagatgatctggagatggccttcctccagagtcgagggtgtgtcgacaggtactcgcatgaaggccctagtgtgggttaaagactaaagtcttgttctaggagatcagagtggctcactgaatcaatgggtctctttgtgtcgcccacgtaacaatctggattgtaacctgccacgggcgagccgtaatagccgcttcccagtcgagagacccagcttcgacggtggagatggtctgctcttgtttcctaagcttggtcaacggtgttattactcctgagagatctttaacgcttacaccgggttgcctattgagtaaagttgaaatgacattgaaccatcgagttcgaatgattgcccaatcactctgatactgtcttttgatccatcttctagtgtgatttctggtgtgtccacgtggactaacaatcgtataaactgggttgaggtgtagaggccatccaaggtgagactcgcaccagctaatgaccgtcaggttacggaacagccctggtgtgttggaggattacgcaccaatctcttcgtttctcaacaggcccaacagaattcgaccaatgtatattgtttggagccccataaacgacggcgctgtgaggcgtggatctttcacgattgaaccaagcttgtcactttttatcacctcaaggcacggttcgcgtatcctctcctctcgctggtcttctgtctcgcttcgtatctcctttggatctaattgaacttgcccatggtagaggaccacagaaatgtctgccggtgtaagatattttatcacctgcctgtaatatgaagtggtggcccattccttactgaaaaaggcttccacttgtactccgggtaacattggtggcatttggtactggagactgcagatgaaactgatgtgtaatggaattcagtaataactaggaaagagcagcgaagagaaaaggagacagagggagcaggttggggaatttataataaaacggaagtaggcttcttcctaatgtgggtgtcaccgttcttcccctgcaagccaaagccatatggggctatgccctctctaccagggagtaaatattggttaaaccaatgagcagtagaagcgaattcagattggggatttttcactggcttgcaagggtgacggggccagcgaattacgcgctgggaatgcagctgcacttcagtactctcccgcagatcatggtttcttttttccccttctgcctcctcctttttcttcatttgttattgcgtacagctcacagaaaaactcccagtgagagggttgaatgatagaaaaggccagcctagtctcccgtacacctctgccgattcctccagcggaaaccatctcagggcgaggacgatacacaatcgaacgcttccgagctaccacatacccttcggcattagtgtgcacatttcctaacatcgagatccgacccgtggtagaaaggagccattcggagactatgccgagaaagctcgtggggtcttaactctcaagctagtcgtcaaaatgtcttgatgtatatgtatgtgactgtagatttcgaagggtcctcatagaaacaatagagagtatactggaatgtccgcagcattaatgctaatacatagacgcaagattatatctcatgaatcgtcgcaatctgttacatgttaccttgaccgtcatgattgaccagggttatccgactccagcgcttgttgcgtcctggttgttgcttcctgcataggcccatgagctagatttgctttttgaaggaggtcaaagcgaaaattgggaggattagacgaagctttacactcaaagttggtaagatatggtttatcccatatgtacagattactccaattacatgtgatagatagccttacgtatcatttcgatggaggggtgaaagaatagggaaaatgggatggaactctcccaaacccaagtccaacccatgaatgcctaacttatcacctgctcttcgacccctgtctcctaccccacccttggaatctacgcaaatggcaaacctcaatctctcaagttatcatcaacctatgttccttgtggcatcaaaccaaagctccttcgacacgttatcctgtttgccaagccgacttaccacgttatatttcacacaaaatcgttgcaaccccaacctatcaccacctagctgagttggagctactgctgttcaatacccttcttctcgagcaatgattctcactgatacttatagcaggtgtctatgctcgtatttgaactgactactacgacaataacgaaagaagtcttaccatcaccccctagtcttacgatcgacatctcctttcccgacattgcgatgaagtggttctcttctctgcgggcaatgatatttggagtacaaaggaacccgtggagtcttcaaaggacatttcagcgacggtctagtctgtaagggctatttttgcgtcaaccaaacgacgtctgcactatagttgtgtcgcagcctactcaaagctcaatgataaaatctcttcacctttacacatctcattgtatcaatccattttctttctctcatttcggagatcgtagatcagttgtgatctccgactcttgcacaacctttagattagtacttgaaattatcctgtacatgcttttcacccttgtatttacccaaatatgcgcctcatcttttgaggatctagtagcatgctcaagacaccagccattgacaattgggttgggtgatgtattggaggtacgcactcgagttccatcaattatattcctacacgcgaatagtgcggtgatagaagaagtcactatatgtacccttcgaaatatgtttttctatgccgactacctattgaagttgcgtccctagatataactctaaatggtggggccatagaggctcctaggctaaacctgaaagagcatattctttgggggctaaaataattgatctagtcatttcatgcttacaatttccttactgtaagttattctgcgagaacatcaggctcagaagtatggatatcccgtttttcgtgtaccgaaagtggtttcactcttcgtagattcatccagaccttttgatgatatgacggtgtatttaaacatatatgacgggggaatctccaagactaactgcttcgaggacacagccaagcagattttcctggatcttggatcgaactatgcatactcccaaacataggttcggacaattatgatcttgattaaacagcttatcttacaaatttcataggccattgagaaggggtgctgctatcatctataacggagcagaaatccttgtccagggtgactatccaggcctgattagggaagcatacatcgccacagacagtatctcatacttctatgtgatagacaattggtaaactagggctagtaactaactaaccagagattgatttagtcaattcatgtagcattcgtccatttgcatttttttgcggcattttagttgaactaaactcgatatagttactgttgtgtcgctcattcattcaactagatagccgctattggggtgttttagtactgataacttgtcattcattcgagtgagcatggtagtctcggtaatttctcgctggttcctgtctggtggtgtaagtaacataaatagagtaagaaaggccaatgtgaagtatggattcctaacacttttatatataactcgacccgagagagtttaagagttcggattgatttacaaactgaattgacacactaataatccgcatatgatcgcgagatgctccggtcctcgggatctatctaagcccttataataaaccgtggtgacactgagatcccatcaaacctggggaactcccagtgtgctagcaacccgggatctgattggcgcccgtgggccctgaagattggccctggtggcggccctatggggggcacggcatgccccacgggccaagtcgacgggacccaacgggcagtgccaagacttccagggaaccacatgggaggtgagtgggctgtgagtggcccagacatcgggggacgacgagctactgcaggaacccaattgcccttagagttggatcggagtggatttgcagtcaattgggtttggtcggtgctgctttcggatgatcgactgttcagtccaaatggctacagtggtccatgtacaagctactttcttcatgcccgttggtatacctgcaggtcatgtctagtgtaccttcgcttgcccctccactctctcttatcaatgcaccccccatgtgttgctgtgatagaacgtgctacacgttgccgtcttcccgtgggaggggtcaattagagccgattcgctttatatttcaatctctcggtcgcttctcttgctcttcgttgaatcgctctgaatattgaacatggattggatgcacgtctacattgtcggggcagccctactggtattcgccctagtcggcttagttcttctcgtctcctctcagcacatcaaggttgccaacactggtgctggaccttacttgaaattcatctgggcgaacttcctcaaaccccatgataagaaggctgggggccagcaagatgcgttggagagcttttacaagactcaggttcgatcgagtgtgtgcttcgatatggctctaagctgaccgtgttaggccgcaatttacgatgccactcgtcgtcgtctgctctgtggtcgagaggatatgcttggcctggtggctgcacagctgaagtacaaggtcggcaataaagaagtcaaggctggaaaggctgtctgggtggatgtaagtattggattgctattttccgagctagcgctaatcgattccaggtcggtggcggtactgggtaggcacgaaagaaaccccgaggtgatacagaacatctaactcgcgatagatacaacatcgaagccatggcggcctttcttccggtggacaagttcttcaaacatgtttatctggtcgacctctccccgtccctctgcgaagttgcccgcaaccgcttcgagcgtcttgggtggaagaacgttactgttctctgccaggatgcccggtcattccagcttcccgggaagaacttcgatttgcagtctacaaatgcagcaagtgatggcgtggacttgatcactatgagctacagtctctcaatgatccctggtgagtatttaagatccacgcaagactattgatattgactttttagactattacagcgtggtggactcattaacctcccgcctgaaatcaactggaatgttgggtgtgtgtgacttttacggtaagtaatacctcgaggcttagcatgaatgtcactcattcagtatagtccagagcattgtcgatgtgtcctgtcgcaactatactggcggcgctttcaaccgccatgtcaactggcttgggcgtgtattctggagagcctggtttgatttcgaccgggtcagtctggaagctgcccgccgagactatctggaatacaagtttggtactgtcatctctgccagcgaacgaaactatttcctcggtggtattccctactacatatttgtcggctgtccaaaggagatggcatctactccatcaagtcaatccattgagaggctggatgcatcttttactgaatctccttacctgcttcctgccaatcacaagcaggagatggataatgcagtggtgaaaagcacacatgagattcgctccaaagcatatgagtctgcggtgattaacctgagtgccaatctgcctctcccgtcgtccttttaccagaaccaccactatcgcatttattacaacgacatgctacccaaacatactcaattccagaacgaatatatctacgcgttcacatgggaagacccgcgagttgaccaccgcctcctgaacatcggtaaagacgacgtgatcctcgcgatcaccagcgctggtgacaacatccttgattatctgcaaaagagcccccgccgggtgcacgcagtggacttgaaccccaaccagaatcatcttctcgagctgaaggtcgcctcttattcagcgttaggccaccgggatatgtggaaaatcttcggtgatggcaagcacgcacagttccgcgaactgctaatctctaagcttagccctcacctgtccagccaggcattccagtactggctcgagcacacccagatcttcacctctacctctggccatggtctgtacgagaccggtggatctcgccacgccatccgtatggtgcgatggctcttcaatatcttcgggctccagggtgaagttcgcaagctgtgtgaagcgcagagtctcgcagagcagcgcgaaatatggcctcgtattcgacgtgtgctaatgagcagaccactccactgggctgttgtgagcaccgaatggtttgcctggaaggctgctggagtaccacgcaaccaaagaaatatgattgtcgacgacttcttccgccgcaacggcttgacggaagatatgaaaaatggaaaggacgtcagcggccaatcgatttgggaatatgttgtcaatactctcgaccctgtgatcaacgatactttgatcagcaacgataactatttctacttcctttgcgctcagggaaaattctcacgaaggttcgttttctcttatatatatctcgactacacgtgctaactgcaattacagatgccaccccacctatctctctcctcaagcacacgtcaggctttccacacctggtgcatttgatggccttcgcatccacaccgatgagatcaacgaggtgatcaaccgtatcactccaggaactctgactatcgccgtggtaagtatcaaaatagcactcaacgggctttccatactaaccttgcaccagataatggactcaatggactggttcgatcccgcagaggactcagcccctgcccaagctcgaactttcaacaaagccttgaagaagggcggtcgcatcctcctccgttccgccagtatcaacccttggtacatcaagcactttgaggaaaacggcttctctgctcgtcgagtgggagctcgtttcccaggtacatgtattgatcggtgagtttcggtatttggttcttgattacgttacggacgaagcttatacatattttctagggtgaatatgtacgcatcaacctggatctgtactaaaactgaggacttgtcacgcccgaatacagatcgcaaaatgtcgactctatcgttgggggaaagtgctatgattgcaggcaagatgccgagcagtgtggagagtctgttgatttaaattggcgataattgttttcccttgatgttgcctgttcatgatacctatgatctggagttaggtggagttagatagagtgtttcgtatgcttgccttcaaaagcgcaggggtcaggagtatgatactatatgaaataaccacaaaatacatatatttgtcgatcttacatacataaacgttcatgatttcaacgactattaagccaaggatccttcaaaagtttaaaggtagattgcctatcatctggatcccactgcaacattgttcgcataaattgcaggaaaagacgcctattttcaccttcaagatatacctccgaatcctctaacgataattcagggacactgacttgtcccttccattgacctgtgtatattttagacatgcccaaacggttttggttacggaagggagactagaacaccaaattgatcccaatacctttgacctcgaagacaatgcattggtgcttgcctttgggaccttctatttcgaaagaatcgagcatggtacgaataagaccattcacattgtgtctcgtttgtagctccgaaaaccgacttagaacttcgacttctcgattctttttccagtcgtgaatgacgattttcagggcaatatagcgatgtttcctaggctcggtttagtaagatagcaaacagtgcacgcggaaagctactgtaatttactcgatgtcacggcagagccaaagggttgaattcgctccaaagcccaatttgctgataacttggtacctagtctggaatgtatccccaaaccgaacaggatagaagaggcctatatcataagcaggcattcgctcctcttcaacctttttggtcggatagctcgatagggggatggatttcggcaccagaaggcgcgaccgaatccaaataaaagatgcttcaacgaaatcgggttgactattcggatttcaatgagaaagagacggctgattccgaactcgtagacgaaaaaagatggtcaagcaagaagacctggaaggaaggggccttgttattatgagagcatcgggtagtggcatcgattctctcaccgttctgtatgtaagcgacgcgactgggggtagcccctgtatgttgtacgctgaaggcttaagcgacaactagaatatatcaggaggcactgaaattatacagactaacggtttaatttgcggtactgtatatattgattctattcaagaggtcgaaagctaactaaatacgtatctctggctgtagactcataaccagagtggtagccctcgccaattccagtccaccgcaacctatcctactagttttcggcagaatgcgaaagattgcacagtaaaatgagtaagagggagacataaacaccagagcaaactcgtctagaaagccagttgatagtatctatggatatactaaggaaaatcaagcttaaaatctgccccattccgaaccttaggtattaaatcacggggccccacaactccgcaagtcacgaatatattatggagctgcttaggtacggcgtcgatccttagagagggttctagcggccgatcttcaggcgttgatttgagcacatttgcgaaagtagtctccatagtcaatagcctcttcccgcaagtcttagtatttactcgatgaatagatccaatattctctccattttcgggtcccatagacattggcacaatttatttttggacttggctatatctaaaccagcaaaccaaagatatgccattcgacttccaaggttgtaaatggtcttggtaagatatctcagatatctcctgtctggatctatagcaaatggtagacaaacatactgacggaccctgaaacagtgaatcctgtattcgaggacaccgctcgtccaaatgtgcacactatgaccgaccgatgaagagaatccctaaggttggacgtccgttagcaaagtgctcacacgtcaatggggctgattgcagttgtcaggaggcttgggcgattatggttcctcttgctccaggtacgtcatgtcatgccggagatttgggttagagatatatttgtagtaacgtttgtcggtttgaataggatcgatggtttgcagaccagaatctgagactcagccggtacagcagcagcaggtcgatcatgtttatgctgagggtatatgattatttttatcaatgagcatccttgttttataaaggaattaggcaaataatgaagtatagatgatattgtcattctaggatcaatagctctaattaggtatttcaccaagccccctttgtgagtcaccacacagcgctacgcagtgcgaggtaaagggagctaagccagaacttcaccgcaatcgaaactccaatcatccaccatgacaagtcccttcctgccagccagggattccctgagagaatcttccaagaagcagttcgcccaccaggacgccgaaaagcacagcaacgaagacgccgacgttgaaggtcatcacggatagcatcctaccaatgccaataattaacgattatccaataagtactaagtatacagacagccgcagatggaacaactcacaagaaatatccaatcaaagccctagcacactcaagcaatgcgcgtgtcccgtctttccacagactccacgttccactggccttccaggatgggaccaggcgtttcagggagaacctattccgagggctatcctttatgagatattccattgacgtgctttgtgtttcattgtcattgttcgagactggcaaattctcttcatcggggtcctcgtcctcgtgcacgcgcatgtagttcggaagaggactgagctttgcttttcggacgccttttcgtggatttactgaggcgagaagcagagttggagggggagaggtatgctgggaccatgatttctcaagttggaatttcagggcgccaagagagcggttgaagatggcgaggaggaatagaaaggtcaatgtgaagacatattgcgtcgtggttgaggttgtccagccagtgaagaggattgtgatttcagtggaggtcgagaacactgctggcatgttcatacccatgttcatgttcgcgctaggatgttccctccagtgcgaatgagagtcagagtcttaaggcagagttcacagtgttgtattactccatgttgaggatggtgagagtgggaagcctacaggcaacaggcaacagacgagacgagaagattagacattcctctttgctctagcggcatacaagcgcaaatccgctcatctccacatgagatgtctcaaacgagttagcttctcgtttgataaaccataaaaagaatgattgtaataagaaaaaatatatatttcaagttagtttattcattgacttcaggtctaatcatatttcacaggggaagaagactggaacacgccaaagcagcggccctctaagcaagtagtgattaaaaaagagtctgggaaaattcataaatggactaccatgagtcccgtgctttcacctcttatcatatcatgcccgtctgttgctcaccaagccaaagtgcgcatacagataaatgatatgcacatgcgaacgatcgtggatatagagtcagagacagaaaaaaaagcccagagaccgaaactctcatgaacggccataccgcgtctttccgaaggagaaaggcacgtaacggtacttaatcatatgctggatttgtcgtcgcactggaaaaggggtcaagttagacagatgtccatataaaaatgctataggtatcggagcgaattccgaccaaagggcaaacatactcgtcagcacaaacagaatgatccagtaaatgaccagcaccggccagaagacggggatatcgaagacagcgagccaggagcaaacgaagccaatggcgatggcgcgagtggccgagtgccagaacttgaactcaggcagacggcggatgaagggacgaaactcctcgtccttcttggtagggaggctgggggacccggcgtcaccgtcctcaagaccctcgtcctgggtgagagaggggtcgaacttgggagtcaggaaagcgaggaagaggttcaggaggtagattccgagtgtataggcgactgtgattcaagatcccagcgttagcggtttgtttatgcagatgtttacagcaccgcggatgaatggctcccgcgcgttggggttgaagcgcatcattttcgctttgctgattccatttataggggttcgatagagccataccgatgtaccagccctgcgcgaggaaaatgcgcaggaagaagaggcacaggagcacaccagaaccaacccagcggtaggttgtgtacggagtcgaggcatcgaggtaggcttgatagtgctgcgatcggcgtattagcatgctggtcggaccattcggctgatctcaggaatgaagaatcgaaagacatcgcgcaatgcctttgcccctcatgggacactcactcgagtcagtcgagaggtgtgcgccgacacggctgtgaagggagactgatcgggctcagggacatccatgatgaagatattagggagaagaagcaaagcacagggctggaccactgaaagaaagaaatgaaagagggaagcaaaagaaaagctgtgattaagataagctgctgaaaccagacattccaggtcaggcactgcacttccttcaggacagagaagtgtccactgcccacgggccaatcagcttagatgcgaatcactagccatcccagtgcacgtgatatgtggcgaagtccaagatgtggcggtgccgtgacataaggcagacgaaaagggcttagcccaattcgaatggacctcgggacggttaacttcggcggttaattttggcggcgttcagtcggtcgcggggaaaccgaccatctatgatgtatcgcgtcggtagtctctctcccttctctgcattaatttaacctcaattgtctgaacagaagtaattatatttttcttcacgtatcaaaatgtttgcccgtcaatgcactcgtctggccactgctcggacatcggtccccttgacttcctacctagcccgagtccggggttattcttcagccgctggtagttacgagcacatcctcacttcggttcccaagcccggcgtggggttgagtatgtacaatcagtcaatataatgccggccacttctcattgctattatagttacccttaaccgccccaaggccctcaacgcactattcactcccttgttcaaggagcttaacgaagccctgaccaactatgacaatgacaagagcatcggcgcgatcattattacaggaagcgagaaggcctttgccggtatgtacatgtcctatttacacttttcacatcctatcctctcccatcatgcctcgccctaatcctaaagtacgtcaacaatactaatccaacaaacccaccatagccggcgccgacatcaaagaaatggcccctctaagcttctccaaggccttcagcgagaacttcatcgcgccctggtcccacctcgccacctccatccgcaccccagtcatcgccgctgtctccggctacgccctcggcggcggctgcgagctagccctgatgtgcgacatcctgtactgcaccgagaccgccaccttcggccagcccgaaatcaagctgggcacaatccccggcgcaggtggatctcagcgtctgacccgtgcggtcggcaagagcaaggccatggagcttatcctcactggaaagatgttcagtggtaaggaggctggtgagtggggcgtcgcagccaaggtcgtgccgggtggtaaggaggagctgcttgaacaagcctacaagacggctgaggctattgccagccatagccgtgtggctgttgtcgctgctaaggaggttgtcaataagagccaggacttgccgctcaaggagggtattgagtatgagagacggttgttccatgcgctctttgggagcaaggatcagaagattggtgagttggcacttcggtttgctgagtgagtgggtttgctaacggttattctaggtatgactgcctttgcggaaaagaagaagcccgagtggtccaacgaatagatgacaaagtcatttggaatgaagaagctggtttttttcatcgcttgcgtgtaattcacgctgaagctgtagaacagaggattagttataagacatagaacagtatcatttaactcgcttgtgcctgtaactctcgactgcaatctcatatagctgggtgcctcatccacgttcgtctcatcttccaaattggcattgccggttgttccgtgattttacttggtcgaggcatactaatacgaaaggtcatatgtcagattgagggtcgagaattgccattgatgtaagagtggaatccggactaacgccaggtgcccatgaatatgcaggcaatgggctcttcagtgctaaaaaaagaagtggagatatataagaaactgcagtggtttacatcaggagcagtgtgactttattttgtttgatcatcatggaaagatattagattactactgctattctatttgctgaaaaatgctatatacatagggggcctatcaagttcgggcccagaagcagaattaatcgtaaacataagatacatcgcatcatatcgaaccgtgatttttctccaattcgcattcatcagttcgggtgtttttatttgcccggtaatcatcaatgacttggctctcaatggtctcatcaaacacatccacttgggtggtcgcaaacttgcgagcgctgacaccgcgctcgaagagcaggtcaagctcggcgaacgtgcggccacgaggctcgggaacgcggaagtacgtgtatatgatgcacaggaagcagatgccaccccagaagaaaccggcgtagttgccccagttccaggcgccggggttcagcatgtaaggggtcagaacgccgcagacgatggcgacaatgttgtacaggttgcggcccagcacgactgtcttgatttgcagtcggcgggtggaaagctcggcaacaagggagaagcagaccgttccaacggtcagctggtagaatagggcccagatcaacatcattgaaccagtggccagggagccttggtctctgtgttctttgggaacaaggccaaggaaacccatgaccaatagcatggtgcacagaccacagagaccgtacagacataatgtccgccggccgattccgagtgtcataaggaaccatgatccgaaaacgccaaccatattgattccgtattgacccatagcaaagttgtaagagttagaggagtctaacccggcctgttttaagaagtaggtcgagtagttggaaaaggagtttccactgagattttggatggcccagaccatacagacaatctctgtgcggcggagatcagtgccccggaagcaatccaagtagctcgcaccctgggtgattttttcctccagggcggtcgtatgaaccatcatagcgacagtctcatctggatcgaaatccccatcttgtccctgacttttggtagtcaaacggagaagggcccgtttcgcatcttcagtgcggcctttccgaaccaaccaccatggggattcgggcgcaagccaaataccaacgaagagcggcagtggccacatccactgcagtccgtacggaatccgatatgcccattcgtcctcccggttcaacatgcccttaatcacaccgataccaataagctggccaagaccccagcagaaattgacataggtcgtcaaataccctcgcagcgccactggacacacctccgaagcataggtgatcgtcaaagtctgaaagacaccccaaggaataccgcagagaatctccgctgcaagcagggcatgcacattcttagccgtgaagaagatcgccgtccacgcactaacaagtacaaggcaggacataatcgtgtaccggtagccgaatcgttctgaagcccagccgttgatgaatagaccgatgatctcgccgcagtaagcaccgttgctcagacctgcttgccactttatgtccagagaattgtcagtttcttcatctcccaaagaggcaagtccaccccactccaagagatagaggaatggctaccgccggaattggttgaacttaccgcagcggatacttgatatgtgccatcggccagcatctcaccatatttgcgattgaattgcgggaaggcgtagaagttgttgaccaaactaatatcgtaaccctccatggcaatgcaagtagagatgagcacgctccaaaaaacggctttggggtacaaccggataccctgtatcaatgtcatagaccgttccttctccgtggctgcctttgcattttgaatgaccttggtcgtggatgagtccgagcccggtccagcggctgaagagtaaccatattcgggaaagacatccaccggcgtgatggcatctgaggccttgggttcggccatgttggatggacgaaataaccgagatcgctgggaggaatggaaggttggctcgagcaacttgcgatatgggtttgagagttggcccggttcggaagtcaggggaataaaaaatcaaagtacccactatgccaggaacattgcacgcaggcactccacggcagcgaaaagtttccttgacgcctaccgagggtaagtgaatacggcagagacaaaggagcttgacaaaaagaggataaaagccaatggtccgaattggcgggggaacgggggatttgacgggcttgatcgcctccaagcgcaaattttggcgggatgagaagcttggcggtgcccggatggggcaagcgatgggtcatcgtccgaacataattcgatattcgagtcgtgctatgttcgggcttgattggtctagtattttctgatcatacagtcttgaaattatactaacagtacattttagatgtaactagatgtagtatgactcatgagtctgacaaccccacgtgggggaactataaattccccttgcagtaatcagaatgttctatatcaaacttctagtagtattcttattattttatatatcccataccgggttcagtatgtatctcattggcaataattagccaaatattgatctactttcaggacctgcaaatcctaaacttaagcttctctactgtaaaccgcggacctgtgaattactgtattgagttagttttgcctctctgggtttagcgccccaatacaccgtcacgtaacctcccctcaatgccctccgatatacataaaagaccaccgaaagtcaggaagcaggcaaggcaatgggcgaatggggagtgcgcatgaattacagtacgggtccttcgtatgccaatctgattgccccgagatggctcaccgacctgtcggacttttaagccccgatgtccgactatcagatcggtggccgagaacatacgtgccgatatgatgatgtataaatttagcgatgtgccaaacaaaaagcctatacaattttgttctcccaaagacatacgttaacagcccttgctctgatctcagcttctccctttcttattgcacaactgccatgtctcatcctatcttgattatcggtgctgggcttggcggtctttgcttggcccagggactgaaaaaacgaaacattcctttcaaactatttgaacaggacggaaggcatgatcttcgaactcagggatatagattgagggtgggaagtgagggtatctacgcccttcgggataacctgtcgcctgagctatatgctctgttcgagaacacctgtgccgaaacggtaatggggggcgtgagaatcaaacccgatggtacactactaggcggcactggccctcctaggccccttgggtcggctgcttttatcgagccccagactgtggatcggagcactttccgggaggttctgctgacaggtttggatgagcatgtgttttttggaaagagcttcgaccattacactgtgaacgacggaaacataattgcattctttgcggatggctcgaaggaaactggatctctccttgttggtgcagatggagttcgatctagggtccgcaagcagtacataccagatttcatgggtatcgacaccggcatgcgcatcatctttggaaagacacccttgagccccgaatttctggctcggtttcccgaggcgtaccaccatggaatgtctcttgttttaaacccagacgatgaatcacggaccaccttgctatttgaatccatccgtttcccacacgcagaaaaagtctcgaaacctcagcttcccgacccatacgtgtattgggtgcttgtcactcattcctccaatatctcgtcgtcaaatggcacatcctggccattaagcccggaaaagtcagctgaacttgctcgacatgttaccaagtcatggcatcctgacttgcaggtgcttttcgagatgcaagacgaggctcaaacttcaacccgattgatgctttctgcctcaccagagttggcctcctgggagccctcgccccatgtgactttactcggcgacgcgattcatcccatgccaccaactggagcgatgggggccaacactgccttgcgtgacgctgcagatctggctcgcaggcttgaggttgcagtaagttcgcaaaccctcggtcgacatgtcatcggggagtatgaatcggagctacgggattcggctagaacggcaatcgcattaagctggcaaggtggcatgaaaggcttcaggctcaaatcagccgtggaatgcaagaagatcctcttatgatttcgctttagctagtattgaacttctctcacctctctgaactcctagctgttccctctttattgaatgtattgttaaggtatcatgccgccaaaacgaatcttcctcggtgtcatttttaatctcccgattattggctgctactcatcactctatgcggtagtgggtataggtcggccggtcctggttatagactcttccatcctcctatttggacagtttgagctatggtttggggtggccggctggcttgtgaaatagttaacgtaaaacgcggacctgtgaattactgtatccggttagttttgcctttttgggtttagcgccctaatacaccgtcatataacctccctcatgccctccgacatatgtaaaagacccgtcttcgctactcatcctcccctgacagcctgacaccgctaggtaatgcaaaccctgcaaacacttcaagacttgagtatctcgcttgtttcgtcgtgcagtcccttacgtacatataaatgcgtgtatcagaatgtctgccaaactacctcggatcaatttgaacaaacctgtatcatccactctggcctctgacctgaagcttgcccttcgtcggttcggagctttccgcctagtagtagcccctgagaccaggcaacactgtcccgacgttgtcattgaaaaggcaggctaaacccactttcctggaatagcattcatcactgaccgcactcctcaggcacgggagttcttcacacaaccgattacagctaagacagacataaaaggatactctccttttgcttcggaacgtgttcgcggccgggctgagatacccaaagagagtatctattttttccgacatggcgccgaaccgaaccatctcaaggggccctcttgcaacttatatcgttcagtcaaatctcttcatgaggtaaaccgtccttgtcttctccctctttttctgtatcgtgctgattttcctttcaaggggtggacacctataaggctgcaattgttaaagaccatatcgcaggcactggactcggacacttccctaactggtactacgcttctcgattctgctactatcgggatacactattatgattctcgaagtcttcctgactttagcgcccatttcagtccccctcatatggatagcggaacattaaccattctattccggtctcataatgagaacgacggcctagaaattgctgatctcgaaacaacagagaaacaagacagtgaaggggttgggtcggaggcatcttttatgcacgttcctacttttggcgacgatgcccctgaggttgtcgtctttgcaggcactagactacagcgtttactcggacgcgaccgagttcgagcttgcgtgcatagagtccgcggaccaggcccggaggcgcacaataactctggtgtacaacgattgagcatcgcaatgttttgcgctccatctgggccatcaacctcaccgccctcatagttcataaatcgtattttaagttgatgagatatctagatgcagcgacgtagagtgaatccacgattattttgagtataagagcacaagcaagcaaaagtacatctacaaacgtgctggcggggcaccagtaatatgagcatccgtagaagactggatacgagcaccaagatctgcgttaacacgacggaacatctcgtaagtagcctttcgaacacgctcgtcagcgccgcacagatgaccagagatgttaccgacaaagttctcctgctggccaggggtacggccaaggacctgccataggccgttagcctggacgtagtcctcggaggtcacagggtactgctcggcgatgacagcaccagaccatttctcgtgttcctggctagccttgacaggcttgtaggcgagcggacggaaagtagaagggtagttggggttggcaccgtagttgccgttgacgttcatgtagccatcgcggtgtgaggggttgaaggctttgagtgggcagtttacggggatctgctcgtagttgccgcccaggcggtggcggtgcgtgtcggggtaagagaagaggcgggactgaaggacagggtcggcggagggctcgacaccagggaccatgtgggagggggagaaggcggcttgttcgatctccgcgaagtagttctgcggattcttgttcagggtgaagcggccgaaacggcgcagaggcacctcattctggggccagactttggtcaaatcgaagacgttccagcggaacttttcggccttttcggggctcaggacttgtacgtagcaggtccaagacggattctcgccgcgctggatggcctcaaataggtcctgggtgtgccagtcggggttctcggcggacagcttggtcgcctcatcgttggtcaaggttttgttgccctgatcagacttgcaatgaatctggacgtagttgaaggtgccgtctggcttgatccacttgtaggtgtggccggagtagccattcatgtgacggtatgagtatggggtaccgcggtcactgaacaggtgcataacctggtggacggactcatggtgggtggagaggtaatcccagaacatggtggcatccttgaggtttgtctgtgggttgcgcttttgagtgtggatgaagatggggaatttagcaggatcgcgcaggaagaaaactggggtgttgttgaacacccaatcccagttgccctcctcggtgtagaacttcatggcgaatccgcgagggtcacgggcactgtccggggatcccttctcaccaccgacggtcgagaagcgggtgagcatcttggtcttcttgccgacacccttgagcatatcaatggtcgtctatgcgttattagcctagtattctctggggaagtatagaaactgcctacatacgagatcgctaatgtcatcagtgacctcaaactctccgtaggcgccagcacctttggcgtgaactacccgctcaggaatgcgctcacggtcgaagtgtgccagcagatcgattagatggaaatcctgcatcagaagcgggccgttggggccaatg
